United States Patent Application Publication US 2020/0157537 A1 - sequence listing, part 17

SEQ ID NO: 34660 - DNA, 1193 bp, Mus musculus
tttaaatgaaaagaaagagtacatttcagcttcagaaagataatcttatatatgtgggataatatgaattatttttaattcttagatttattgcacaatatcttggatactgattatttaaatcacatactgtttgtttatttgcctatttgtttataaaaggtcttactgtgtgactcaggttggcctagaactcttgatcttctttcctcagcctcctgagttctgagattacaaggcttgggtcatcacaccccagtacattacactttcaaaaatgtatacaggagttatatatacatatagaaaggcaggcgcatgtgtgcattcatgagtgctcacacacacacatacacatacatgtgcacacttacccaactatcaatcattgtctttttacacacaagattataatgtggtggtcacatgaccagattgtccttcaaaagcaaggctacatagtggatcagagctgaatgtccatcagggttgtgtggagattgaagctttttatcatcttcagtgtatttcttactcctttttctaatgtagagcatagaagtggtgttaatattcattgtgctctgcaggcctgtatgtgctgtggtgctttcagtctggtgacaagccatgcgagcccttcattcccagcatcctaatcaaatggcacatgggcttctgtagctgctagatttgatgtacttaaagaagtagatcatggaaaagctattcttcagatgtgtgtgcatctaaagcatgcctttgtgtgtgttcctgcaggttcaaaagaggaatttcatagagaatattattccaatcatcatctccctgaagactgtgctggagaaaaataagatccctgctttgcgggaactcatgaactacctgagggtaaatgaggagcttgccctgtggggttttcctcccaagccccgctgccccaggttcattgcttcatgtagacagtgagtgacaagaactcagaatgctaggaagcctagtctataaaaatgtacccagcaggctgctgaggacagtcaggtaccgaagggtgtgacgagaagtaccactgaggttgctctctctgttccccaggccgctgaggttttaaagcttatgttcatgtcctacaccttctttgggaatatgttccactctaaagcttttctcagataaagctgaggacaagacat

SEQ ID NO: 34661 - DNA, 1112 bp, Mus musculus
gtagcagcaggcaacagcctgatgcctgtgacagtgccccaggaaggttttcaggcagtgccttgctccctggaccctgacccaccgtgttgcctctgttgattggccagtactgtcatttccatcctggagaatgtgtttggaatcagcattttataaaaaacccaaatcagaaaggtgaaattgcttgctgggaagagggctctgacccaggaaactctccttcccaagagatgccaggagataggagaacctgtctgtcttaagtctgaaatggtactgaagtctccttttctattggtcttgcttattttataaaaatttaacattctaaattttgctagagatgtattttgattactgaaaatttctatataaactgtaaatatattgccatacagtgtttcaaaacgtatttttttataatgagttcaacttaaggtagaaggcttgggctgctagtgtttaattggaaaataccagtagtaaagtcttttaaggagttttcttaaggaggctggctgaatattcctttgttcaaaagaagttttagcatttttcataagaaaacttactctgtctgaccactgttgcttaggaaaccattaaagaattccaatctagtcatgtttgtatttttttttttttaaagcaagaaactttgggaactcttggactagttttgaatggcctcatcctgtagatttcctcttcctagaaaggccctgtgcagtcctagttggatggtctcagggacccctcatggtactaacttgtgtgggatggaatgtccacttaaacctgcaccgccctcatctcagctctgcacctgattaaaatggtcactggtggtatcctgggctggtctccggcaggaggctgaagaagactggtggtcagtggttcctgtctttgagtgtctgtgacagaaccctagtctgttttgggtagcttataagacaaagccagtgagcttgcttgtaaaaatcattttaaatatttgtttagttgataatgtatccaagaccaaaggcaattttgaaactgaacatgtttaaaaagaagatcctttgttgtgatgaaaagagtcccagcactgcaggccgtctcct

SEQ ID NO: 34662 - DNA, 1165 bp, Mus musculus
accaggcatatggccctggactgtcttaactctgcctgtttagggaagccagacaaggaagttgggtcagataagtccttggcacccagctgagacaaggatattctgggtcctgctaggctccccacctctatacttttctatttctttctctctcttctctctgtacccatcatgcctttcttttgctctagatctccaaaagagtgggtatttttgaaggagcagaggctattgtcaatgccacaaacagcaagctgcccttgtaggctgatgtaagggccatgtgggggtggggataggggtgggggtgaggttgggggtggggttgtgactccatgacgaaggaaggttgcctttgctctctgactatgctgggtgctgactgcgtttggtgacacggccaccacggaaagtgttctgaaggttatgatgggcccctttttctttggctatgggagaaagagagcggatagatttgctctgatggattggtctgatggctcactgagctttgtccaccgtgttctcccaggccgggccagtcttcatgataaagcatctctgcggctggagcaggtgcgctctgaggaccagggttggtacgagtgcaaggtactcatgctggaccagcagtatgacacattccacaacggcagctgggtccatctcaccattaacggtacgtaaatcttttggtaatggccaaataagatgacctctgtggcttactccagaggaagcccctctactgagagaagccccagtaagccctggtcccatacaatcttggttaatatctcctttacatctcttcaatacattcctggaatttatgggtcagtagagtgtgtgaaagcagcaggtcccttgtgtgcagtgtcgcatcagagttcctctggggaaggtacaaatctgcttctaggaaccaggaggtttggattggtcagtgttggtgtcattgtctagcctcggatgactctgctagctcaggatgtatctcttgtcaggtggagttccttgagtctcagcatgaatcttcctagaccgctcacttagtttctcgttgagtgcatttatttgggtaataagtaccaagggtctgttaacttcctagccctacaccagctgctaggtaaatactgtggagtaaactcaggcccat

SEQ ID NO: 34663 - DNA, 1174 bp, Mus musculus
ctctgttggagagcgttgggcagtaaaggtatatggaggttatagagggctggcctggagatcgtgtagcagttagagatgtggtacagaaagggtgcctgagcctcacagcagctggaagcatctctgtaatggctacctgggctctgctgcctggacaccccatcttcagcatcccagagcttcctgagaggcctggcatgatagccctctcaatcaggagaggtgatgtttattcctgttctccccagggcctcccttcattgtttcccctcctgagaacatcaccgtcaacatctcccaggatgctctgcttacctgcagggcagaggcgtatcccggcaacctcacctacacctggtactggcaggatgagaacgtctacttccagaagtgagcagcaccctgctccaaccctctcacaagggtccccacaggcccctgccttgagagaggggccctggcagtgcctgggaaccctctaggggaggtgaagggactcattgttaccttgcttgtatttctgtcaacatccctcttctccttgtctacttgtcactgttttgcagtgacctgaagctaagggtgcggatcctgattgatgggacactgatcatcttccgagtgaagccagaggatgctgggaagtatacctgtgtccctagcaacagcctggggcgctccccctctgcctcagcatacctgactgtgcagtgtgagtaggggtgaggcaagagggttctgggcaatctagtaggtgcaagctgtacgagttagatttgaggttgaagacccaatatgtttctgaggtctagaggaatgcgtgagggaggagtaggatggctccagaggaggccatgagcagcctggccatagagttaactgtcagcggcagagatctgtgggctggtcatcactgggtgttagccaggtcattgattcaagcttagatcaggttcaaggataaacagaccttagctctgaacatttaccattcagaatggtggctcttgtgttaccaagtactggtttattatacctggaccttgaactagttgctgctgggccctttttcctgggtgtctgcgggatcagggttggtttttctccccgttctactctgcctttgcatatgggaacactgtgcactgaatggaacaggacttttctgggt

SEQ ID NO: 34664 - DNA, 1223 bp, Mus musculus
tactgaggccaagcgaggccagacacccagcacaagcaatacttacccttatgcttggaacatcattgtgcatagcactgacattgcttttttggggttaggatacaaaggagttggagaaatgcatggtcattgttggcttggcagggctagggtgaagtctgcagtgagggctgcttccgtattctgaagaccagggcagttttttaaaatatgcctctgaatgtctccaagcattctgcaacatcctaaggttttaaaagcgtagtaaattggacggatgaaaaaaaaaatgcacagcctacccgagcctgttgtgcgaggtgcctgcgagctgggattgttggtcttactcaccctggtggccctggctccccagcactatgttgaacactgagaatcttagctaggaggtggaaaggttcctatgcaaaggaatggggttcgtgcaccagcttaccttctgccttcattgctcaccgggcttctcatgtttccccacactgtccctttcacagacccagcccgtgtcctcaacatgccccctgtaatttatgtgcccgtgggaatccatggctatatccgctgtcctgtggatgcagagccacctgctactgtggtgaagtggaataaggatggccggcccctgcaggtagagaaggtatgagtgaggtgcaagatgggattccgaaggaagagcatccttctgacaataaagatgctgcctctgggctctggttctctgccagccccactcctcctaaaaagcctaggcaaacaaagagcaacgatctggcaggagtttggctgtgctccatgcccactggggatgccagcacccgccgagctgctgtcctgtcctgtgcttcgtctagcccagctcaaaccctgcctggaagtggctgggatgcagtgcctgtgtcctgaccacagcttgctgctcttttatctatgtctggcagaacttgggttggaccttgatggaggatggctctattcgcattgaggaggccacagaggaggctcttggcacttacacctgtgtgccttacaacaccttggggactatgggccagtctgcccctgcacggcttgtcctgaaggtgagtccccaggactgtgcgtggcccctgtggtgggcagtgttcctgtggccaaccttttatacctgtctctgtgcttccattaggaccccccgtacttcacggtgctaccaggctggg

SEQ ID NO: 34665 - DNA, 1099 bp, Mus musculus
cttctgctgcttcttcttcttcttcttcttcttcttcttcttcttcttcttcttcttcttcttcctcttcctcttcctcttcctcttctcctcttcctcctcctcttccttctcttcctcctcctcttcttctacttctcctcttgctcctcctcctcttcctcttcttccttctcttcttcctcctcttcctcctcctcctcttctccttcttgtatttctcctccttcttctacttctcctcttccttttcctcctcctcttccttctcttcttcctcctcttcttcttctacttctctttctacttcttccttctcttcctcctcttcttcctcatcttctccttttccttcttctacttctcctcttcctcctctttctcttcttctcctacttctcttcctcttcctcctcttcttcactttcttttgcctcagctcacatattggtcatattgggtagtggcagtgcatcttaaaacctagagaggagcctgtgggtatcagttgagtacagctcagggacaaatagtgcggtccagttgcccaggacaatgtctcctccctgtggtatcatctggaactgcacctgtagcaggtggtttactcctattgaagttgaagaagtgggtggctttagactggaaaacctcaccgctagattctttaccttccatcattataactttccctttggttgcaacttctagccttcaaggcattaggagccctgttcctgccatggggaaaaatctggtcaatttttaaaaatgctttggatatcctcagatgacctaaactggactgattgagtggaacatcctgtgatactctcggccctacttctgcctctccctggtagggcagacagcccatgtcatctgggttccttctctagtcacgacactgcccagcttccatcctcatgttcagtgtccctattctagcaagacagagtccatttatacagtagtacttggagtgggattctctcacaatgcaaatggtaactgaccagtgtctacagcatgatttacacctgaggacccttttcactggggaggtaccacaatggggtgtgccctagtgccatgaagg

SEQ ID NO: 34666 - DNA, 1187 bp, Mus musculus
atttctttatgacctgcagctataaaactgtcactatccaggaggccctagcattgtgtgtgaggctgactgtcagcctgcagccacccgtgttggcaagatcatatagttcttgggagctcacctgcttccggggcctcaggtggctccttggatggatggtgcagagcgggaagaatgattcacctccctgctctatgcctgtctaccccactgttcaccagcataggtgcattgttgccctcagggctttggtaggtgtgggacagctcttacccagttccttgaaagtggccaactctaatgtcctttgtgatttctgttttcccccactccactgactctgtgtttccccgtgtcttctccatatcagatctgagagaaccaagccacattatcactgtggcagacccagaaactaggggcagcagtgagggacagttgttcctctcctaggttttgggtagcatccctagcccagaagaacgaagtcctctacgtcgttcaagttaggtctttgtggtgctaggcaacagggacccctgctcattctcctgcttgctgaaagattccctggggcacaggagctgccgggtcatggggaagctgtggcccctctgtggatgctgtcttcgtgctgtgcctttgcatgtgtcccctggtcttgcttggagaagctgtgatgtgtattgtctgcgtttgtccttgctttgtttcttcccccttcagtttctctcccttcctcctgctcattccttttgtcattccccaatcctgtcgtcgtcttctctcttctctctttatcctcttaccagcttccatgtcagagtggggagttgcagtatgtggatctattctgtgggtgcctgggagcccagccactcactcagcgttcctccgatgctgatagtactctgttgactccatctccacttactaccttctgtgccctctgtgatgcagagggctggaaaggctaacacaatcccctctgattaggattactgtaggaaggggtcctcatctggacacaagcctttcctgaggcctgaggtaaaacactgagagaaggatccctttgggattgggctggcttaatgctagcttgtgaattcctggctgtctgtggggcatgtagagtgcgctcacctttttcctggctgtgatatgaatttgaatggatttcc

SEQ ID NO: 34667 - DNA, 1146 bp, Mus musculus
ggaaactgttccttttcagagcttccatctcgggggattgactgcatacgcagccaggccttggtgctcccttctctctccttgagagctggggatggactccacacttgaggcttcaccttgcaagtcctatcaccacagctttcttctggacatggcaaaaagaggtgctgagggcagagcttcttttgctctgagattagggccacataccttagaccctccaactgatgtgattttcagagatgttggagaccactggcccctagacctcaactctgacgaagcagaagggttgagttggaagactcacgttctttctcaaaagcggcacactgcttcttccactgtgacaccatgggctgctaactcagtgtctctgggtctgctgggaacaaggctacctgaaatactggggcagtatttggagattagtactggcctagcctatagtgtttgcttgctgtctcacatcacgtgactcctgaaccatggagtgtaaaggcaggatgtcagggcccctagattttgtattgaacttggacaactattctgaggaccctcctgggaattttggccactgtctgggctttgaagttacaactgagaagaggttgctgtcaaagactgcttctttgggatgttgtagggccaagagcctcagtccatggctaggcttgcaggctgggcttgcaggctgtgctaacaaaggtgctgactccttttttctcttcttgcctctggcagggctccttacctctgccttgctgaccaaatcgtgtaaactgcttttgactggccactgggtgacagctgtgctcttgtgtcccctgggctcagaaggggcacaaggtctacccattccgaagtggcctctcatacagtcttctcctaagaggtcttccttcttgtgactttccttagaggccagcagcattcctgaaattcaggaaactgtttcagcccttcctttgatgactgcatagcaaactggcagatacagtccccatggtcagtggctgaccagggtgtcataggcgcgatctcaattgctagatgtgagcacacgcttgacagtctgtttagaaatgtgtgatgttggggtgtattcacttctagggaccaattacctttacactcttcctc

SEQ ID NO: 34668 - DNA, 1423 bp, Mus musculus
atcatagctgcttcttaggatctaagtctgatactgaggccatttcttctgactttgttggaaaaacccttttaagaaggcttggggtggactgggaaaagtatagataagtacattttgttagtatatagagaactctaggaagtgaacagctaatggtttggatttgctttgtttgcatgtaagaagtgctttggggaactctgcagggacttaggggtggggggatagagtcaagagcagagatgtggggcatgggaggtgctgctgctcctgtttttctctcggatcccgagcgttctcactcgtgctccttggctgggcccttccctttgtgcaagctccaggccgtgctgattatctccgtctctttgggagcaggctcaggatgtggcttagcagtcatcctacactgaatatagtagttgatagggcaggtgggattgaggaagaggagttagactcaaggagtgtgagacttagaaggatgggagactggtcttcaaatgcccatggtagctccttgtcggtggaaagggaagggttgttctcgggagcttggtccttattcttatggctgctgtagcaggctgtgtctgaaagtgcctagtggacactggtgctgatggtggagaggagttgtgcctccagtcttgtcagttttcttcttgagctatcgagaatgccttcatcctgcaggctaacagtggccttgtgactagaggctttgctttcaatttctcttcctttgataggttaaagataccacactgtagctatgacagttaactaatttcatctgaaaccagacaccatctattgtgtccttactctgtagaacttcctcttggatcaagaggaaaaactgaagatctctttaagagaagtcaataaactgagaatcaaagcctggttggactctaagaactcttcccacgtcctgcaacttggtgttttcgtggctggcttataaccccttcacttttaatgctgaatcagcatgggtccagagccttgtgttagggcccctgtctctgcttccaaataagctttcagaaaaaatacactgtctgcaccagatgtttggtgtcatggattgccaagaggattgaagttgtttcatgaccccatttaaaaaaaaaaaaaaacaaaaccaaccctaatcaattgagtctggtctaaagacactcctagatcattgggaattctttgtagatttaaaaaaaaaatgcatcaatgcaaatctttttcatgactggtcatgtcttaggagggggaagagttgggatatcctaactgcaaaatagttgggtacatcagcagcgggccattgaacctcttagaggttctcctctgcagtgggtcaactgaagcagttagagattcttaggcatgctggtgaagagtggtcagctttgcacca

SEQ ID NO: 34669 - DNA, 1545 bp, Mus musculus
gcaatagtgctggctaaccgtgggagcttcaggtaagttgtccacatggggagtggggggggggtgatgtaagcagggagtggggctcgtgcccgctgcacatatatataaatataaagaaaacttatatagagctatctatctagcatatctatatatctatatatctatatgatgtcatagtttgctttatttttgtacctgtgcttagagacactttgagcagtatcgcctcccccaggtggtccggggtgctagctcatgccttgatcccactgatatttctccatcctcctcaagacagactgtgttggaagctgcttgagtctttctggtagatatgtgtatatatgaacaaaaacaaaaacaaaaaaaccacaaaaaaacaacaaaaaacaaaaaaacaaaactaaagtcatttatagaaaggacaggcaagccgaaggcgccaagctgctggatctgcatgtctcctgtcaggggggttccctaactcctgctgtctggtagatgtgctcagtgtagaaaggacgatggagagcttagcatgaatccatacccctctggctaagggttggtactcagttctttggaaacgatttagctcggcatcttggacagagggagctcagattctctaggtcgtctggtaacacctgtcctgctttgtagcacctgggctcaagcagcccccgtgtgaggtggtaggaaggtttttgaagctgactgcgtgggttcagtcttggagaagatacaccctggtaattactgctgcagagtcttggaaccagcatgaatgtgatatctagtataaatatagcatctgtgctttttcatttatttttaattggaaaataaactgttgtcggaaatggggcagtctagtcccagaacactgagcggaagatcaggaaaggggcactgacaccggttaggatgtgagggataggtcctactgctggctgcttggcccgggactctgaagttaacaaatgtattggaagaaggtggtttggatggagattccgggagttcacttgcgtttgggaaggaaactgtgtgctctgaagaatacctctttaagaattcaagacctcacatatgctgcgagggccccatgccctgcagccttagctggcgtctcctggtgctagctctttcttctcatgtgccaagtgatcagagtggtgtccttgaagctgatgcaaagccaggggagactcaaggctgaagtctctccagtcttcctgcttctcacttaagaaaaggcaaaagtgcccccccccacaccaatctgtccaaacaaaacatgatgctagccaagagctcttatttcagatgcctcaactgtgggaagggcttttatgtttttgtttttgtttttgtttttttctggtgggggaggggagtgaaaggcagagtaggctggagaggagcttgagtctaactcctgacccttaaggagaccttatgattcctttgatgatcttttcaaaatattaaaaaaatgtccaagggtattgtgagaaaatgggttctcctgtg

SEQ ID NO: 34670 - DNA, 2367 bp, Mus musculus
aagaacagcaaattctttgtccctttctagcttgagtcccctcctcacttaccaaagaggggattgggattccattgtttgttttttgttgttgttgtttttgttttttgcctcacttttggtcataagctatcagcagagcagatcatgttagcatctcagggctcatagctcatactccatgaagcccaggtttgctctgactctactctttccccgttgagctaaaggcttggtccttagaaacctcagcagcatcaaggaacatgagattgccctcctatttcatgatgtccaattggattcctctctggaaacgggaagatggacatgtccttcaccttgaagttttagggcttgaggaatgtgccactattactctgtctatgacctcagtcagacggtgcaaagtgtgcactggaggagaagggagtcggggctcagtatccatcacctagtctatagaagagccagctttccatgatggaacgcagagctaaggaggccaggatctgactatgtatggaaagagcaagctagctgaacgttgagtctcttagttaatgggactggtgttaatgggaaggctgctctgagaaagctactgccaggatcctgaactgtttccaatacttgtgattcaccttggtccctaggtcatgggagatttgttgacttgtgatgctctttcttcttggtaggagataggggaaatctaaggagacttagtttggctacctctgtctgttatatggaatgaacgtggaaacagatgtggaaattgttctcctaagggttgatgcagctctgtcctttccccattgtccttaaccaggagacttggggaaagggacacctctaccactcatcagttgcttgggcctcaccttatgctgtaggtactaactatgtggagccatttggacaatacaaaagcatggggggaggggcaggacacagctgtggatcatgatgttagagtaggggggtttgttctgtagtcaagaaagtgactgaaaggagttgctgtatggaatgaccttgatgccagaactcaagactgagctctcacaaaaggagcagctgaccattgagcgctgtatgcactgtcagacagtcttacagctccattcagatttaattttctaactgccatttgtggggtcggagactgagggcaggaatgggacatgctttcccaagttacctgtccttatacaatccttgactgagcagagggtgccctgctttggtcagcaactctggggcccccttcatcgccgcctcttctctctttcatgaggaggaactgtatcatcttggacacagttcttccctcgtgcagttaaaggcagtttttgttgtatgaattctttccctcctgtgtcccattagtgtgtagacacacggcagtggggaggtgaaggatcctggtgctccctgtcaggctccctcacagactgcacacctcttgcccctgacagcctcctggctgttagtcttaacatatctggacgtgactatcaatatcgtcatgagatttcttgctctcatttcagacctttattcttcctttggctttcgttgggggctcttcctcccccatgcctagtcttctcatgaagatggttcaaacctcatttctatttcttgaatgttgagtattacatcacagcgctagggtgcttcatggtgctgctcctgaagaggccagctggacgggatcagtccgcttcgtcccactggttccttagagcttgctgtatcttgtccctattagatgtttttccttgtgggttggggtgggagagttaggggtagtttttgtgttctctctctctctctctctctctctctcccctttctctctcccttcctctttctctctatatgtatgtatgtatggattggttaaagtcagttatcatgggcagctgactttgactccaaattaaagttaaactacacattgtacagctgcacacagaacacctttgagtgtgaatttggatggcaactagaggcatactttttgaacttcaggtatgtaactgaaaagtaaataaaaacactattttttcagtaacctttttttttccttctaaaagataacttaaaaatcaaactatacgaacattaaattggtgctgtaccaaagccttatgacatattccacactccgtatatcctgtctcccgggagctctctgcttattactcttttcaaaagcctgggaatgccagtgagcgtcaagcctgggtctgggtgctggggacccgtgggccaaggggactcgtgggagcagaagatgatggtggaggtgggggtacccatcttctgcctgagcagatactgaagggaaagcag

SEQ ID NO: 34671 - DNA, 1174 bp, Mus musculus
gaatttgggtcatggtatttactattttggagtctcccaataaggcttccattcagaggtgacttgacagactaagcttgtgagtgagtgacagttggggttgaagcgataaaggtgcagtgacagaaaaagaagtctctctaaaccaaatatcagacctggaatagtgatggctaataaaacctgctggaggctattctctaccgtttatttcagtgtgtttacttcatgtgtcttgtgttacataaacaatggtgtttgtgttaataaatgatgcagcagaagcgacttctgataacccgtgaagagatgtgtgtgtttatagctaccttgaaactttagatttaggttaggcaaagggtaagtgagctggttatggtgtaatccgcccataatcccagcatcacagcgtaaaggtagaaagatgacaggttcaaagccaggttgggttacatgaggctagaaaccctactgttgtacaacagtcccatcctgttcctttaagggaactatagcaatacagctatctttttaacctgtccattctgctgttaagaatagaataagacaggactggaatgatggctcaacagtcaagagaagataatgctcttacagaggaccaaagttggtaggtcacagcctcctgtaactcttaactacatccagtaactctaggtccagtggagttaaagtctccttatctctctgtatgccaacatgcatttacatacacacatcacacatcataaataataaagtatgttttaaggaactaaattttagaagactggggtaacatatggaatagagagatgaaatgaacaaacaaggaagggtgacagggtcatactcccttgaataatcctcatgtttgtcttcctcgtggtaggtagctcaacttccgagtgagcccagtaggattcaggagttaaagttggatggagaaagggaagagtggagctggagagatggtccaggggttacgaacattggcagctcttacagaggacctgagttacattcccagcaccatatggtggctggcagtggtctatagctacagccctaggggctccaaccccctcttctggcctccacaggccctgtacatatggtgcacagacatgcatgcatgtaaaatacccatacacataaaacaaaaaatctcaag

SEQ ID NO: 34672 - DNA, 1172 bp, Mus musculus
aggtgctctcactaaggtgactggcctctaacagcattgctgtcagctgttttacaagtcatttcaaggagggatggccactcttgttcctgactcatgccaggtatccacactctttttcctgtcacaatagtttttatttttgttttaaaatttcttcttttgaaaagaactatgacgaagacaacttgggaagtttgtcttgcttttgaacattttctgtcaacccgtgctgagcagaggtgaggtggaggcacaggtttctaatgatggaataaaaagtcaaagtgatgtctcacacttatggagaaggacgttctgggggctccaggagtatcttcattgggttatggaccagtaagactttgggttagggatcccctagtctcttctgcctattgtgtgcactgattggagggtttagaccaatccctcctcttatggagctcatcatgttagggaggaggctggaaggagcccagcgtggaagtcggctcctggagactctagatactgttgctagagcctcttcccctttgggcttgcttcttttgcatttcgtgtactgcagaaggatgagagggtctggcgactggctgagtgtgtatactgtgtatacatgggagctggctgctgaggtgacagcgacctcctcctaataaagtaggatatatttaaaacttgcatcttgtgtctgtctctgtatctcatccatgggcacattcttcatgctgtggtggggtgtcggggacaacagggtcaatggtagcgtcatcccactgcatgaaatctcagatgatgaggaggtagagcctaggccaaaaagcaaaggggcagtgtcctggaaatctgcatgggtgaagaagaaagccaaccagtgctaacgaagagaccctggtcccagtgtttgtgagtggtggatagtataacaagtcatgagtcttacagaagaggagttcaggtccaggctggggtcttagagaggacctcttggtctgtatttggtgggtgggggatgagtcacgaggacaggccagcatagtccactatagaggactttctgctactcaccttagggaaaaccttgtttcctaaggaaaagattcattgtattggcagaatatctaccttttcctagttccatgttgggttgacaatttcagcaaatatgc

SEQ ID NO: 34673 - DNA, 1099 bp, Mus musculus
tgaggagggtgccagaaaatgttgaccagcttagaactctgatcaggcgttcaagaatcaagctacaaagaccaggcaggtggtttggtacagaaaccagttgtgatttatatatgtttggcccaggtagtgacactataaggagatgtggccttgttggagtaggtgtgtcactgtgggcaagggcttaagaccctcatcctgagctgcctggaagtcagtcttccactagcagccttcagaggaagatatagaactctcagctcctcttgcaccatgcttgcttggactgtgccatacttctgccttgatgataatggattgaacctctgaacctgtaagccagccccaattaaatattgtccttataagagttgccttgggctggagagagggctcagtggttaagagcactgacaactctgaaggtcctgagttcaaatcccagcaactacatggtagctcacaaccatctgtcataagatctgacaccctcttctggtgtgtctgaggacagctacagtgtacttacatacaacaataaataaatcttttaagaaaagaaaaaaaaaaaggttgctttggtcttggtgtctgctcacagcagtaaaaccctaactaagagtctagtgttgagaaaaagcctgtggtagaataatttgaaaggacttaagcacaaaggtgctcattatctttattttctttcctgttgctgtgacaaattactattactataaaagcaacttaagtgacaaagggtttattcggcttacagttcaagagtatagccagtcataacagggatggttaggtaacaggagcttgaagcagctagtaacataccatctacaatcaagaatcaggacaaagaatgtgtgctgttgcccagtgtccttttttcatttatttgtacagtcccaacaactagggaatgctgtcgtccacagtgagctgaacttcacacacacacacacacacacacacacacacacacacacacacacacacagagggagagggagagagagagagggaggaggagcgtaaggcattgagttagggcccctcttgttgaacctgcagagatggcttgataaga

SEQ ID NO: 34674 - DNA, 1825 bp, Mus musculus
tatgacacgggatcttaccctatagcccaagccggtctcagacttactgtatagcataggaggtccttgaacttgtggcagcctgctgccttaaccttcatggtactaggattgtaggaatttgacaacagagcagaaaatgtatttttaatacattccatgcctgaagtttttctctctccatatcttactttaggctttttatttggcacagtgcctacatgaaaatagtataaatagttcatttcaactattacgctgtcgtttgatgttttgttttctgcttttgtttttggtttttttaggataattcagattcattgcatccttgaagagcatcaatagaagagggaaaaaaaagatgggtgtgaaaacatttactcacagctcctcttcccacagccaggaaatgctggggaaactaaatatgctccgaaatgatggacatttttgtgatatcactattcgtgtccaggacaaaatcttccgggctcacaaggtagtactagcagcttgcagtgatttctttcgaaccaaacttgttggccaaacagaagatgagaacaaaaatgtgttggatctgcatcatgttacagtgactggctttatacctcttttagaatacgcttacacagccactctgtcaattaacacggaaaatattattgatgttctagcggcagccagctatatgcaaatgtttagtgttgctagtacatgctcagagttcatgaagtcaagtattttgtggaatacacctaatagccaaccagaaaagagtctagatgctggacaagaaaatagctccaactgcaattttacttctcgagatggaagcatttctccagtgtcttcagagtgcagtgctgtggagaggaccattcctgtctgccgagagtcccggaggaagcgcaaaagctacattgttatgtctcccgagagtcccgtgaaatgtagcacccaaacaagttccccccaggtactgaattcttcagcttcctatgcagaaaatagaagtcagccagttgactcttctttagcttttccttggactttcccttttggaatagatcgaaggattcagcctgagaaagcaaagcaggcagaaaatacccggactttagaattgcctggcccatccgaggcaggtagaagagtggctgactatgtgacttgtgagagcacaaaacccaccttgcctctaggtacagaagaagatgtccgggtcaaagtagaaagattaagtgatgaggaggtccatgaggaagtgtcccagcctgttagtgcatctcagagctcactgagtgatcagcagacagtgcccggaagtgaaccagttcaagaggaccttctgatcagtccacagtcttcctctataggtataatgctttctgttttcttaagctttttatggtcaattcaaagatttcagcttttattttatgtgctcagtcctatagaaatcatttttaaagtggagttaaagcataattgaatttgtttgtttgtttgtttgtttgtttgtttgttttttagagccaggtttcagagaggtccaacctacctctgcttgcagagtactgggattaaaggcatgagccaccacacctggctgatgatttggggttttttggtttttggttttttgtttttagatttttttattttatgtatctgagtacacggttttgaccttcatgtggttgttgggaattgaatttaggacctctgcccactccagtcaatcccgctcactcgtgcccaaagatttatttattattataaataagtccactgtagcactgtcttcagacacaccagaaga

SEQ ID NO: 34675 - DNA, 1099 bp, Mus musculus
gcaggtcctcagttgagactccattctgatacaactctaggctgttgtcatggtgacacttaaagctaactaggataattaatttttgaagtctggaaagtacatcatttagaagaacattcagaaaataattcagtatatcttccctcattgcctcttccctgtcttgccctttttaaaacagtagtgacttcacatatcctgaaccacctctgaaacaacatcgagtctgttttattggcatttttttctcttaactatcgttataaaattgttgttcaggaatgtgtgattttatgacctgtcagtctattttatttttcagatggtattttgttgttctgttttataggaattaaaccatttcagtgtgactgctgtggaaaaaagtttaccagggcttactcgctaaagatgcatcgcctaaagcacgaaggtaaacgctgtttccggtgccagatatgtagtgccactttcacttccttcggggagtataaacaccacatgagggtttcccggcacattatccgcaagcctcggatttacgagtgcaaaacatgtggcgccatgttcaccaactctggaaatttaatcgtgcacctgaggagtctgaaccatgaagcatcagagctagcaaactacttccagagcaggtgaggtgcacagcgaaaaccccatcaggaaaaactgctttctgaactctcctgcttttagggcagcctgctgtgttattgtcaggttgccaggtagttagttagtcacagtcattttaaattgccactgcgcatactctgatctcctcatctgatgaaagtttggtaggtctcctaagttataaagtcatactatattgtatttaaaatatctcctacaaaataaataggaaaaatatccccacagaagactatttgtcctcttgggtttttgtttttatggagttaaatgaatttctatatactatatatcgtatatataatatactaggtttaactaaatcttattaccaaatataccacgtcacgtatatcttagtagagtataggtcagactataaatgttagcagagttctctttaaaatttatatatccaggcttggtg

SEQ ID NO: 34676 - DNA, 2741 bp, Mus musculus
ctctttattatagtttgaaaattaattttgtattttatcctttgcctctcatttagtgatttcttagtaccggactacttaaaccaggagcaagaagagacccttgttcagtatgatcttggagaacatacttttgaaagcaactcttctgttcaaatgcctgtgatttcacaggtctcctcaacccagaattgtgaaagcacttttcccctgggctctcttggtgggcttacagagaaggaggaggaactgcatgagcagccaaagaccagtgctcctgctgaggcgcccagggatgacccccctaaggcagagctgcctgctataactattgagtaattctgtgattggcctggggtttggttttttggaaagtgcctgtgcttggtctcatatgtttaaatttaatttaatttttaaagaagggttccctttgtaaaccctaaaactggagggttctatgttttgttttgttttttcatagctgagagattgcttctgtatgtatacaataaggtaacattgaaacagaacataaactttgagacttaaggaaaagcagctgacttagaacatggcagttcttcctcccattgttaaaagtgggcagcagcagatacaaaagaactcaggctgtggttgaccttcctgagagaagagggctaatgagaagttattaaacagtttgacaaggcctaagtaaatgtgtactcctaagtgcagggtgttataaaccctgtagttttggaagtatttgtggtgggtttgtttttgtttttgtttttttcagatgaaggtaaataacttctgaaatccagtatattcttttttaagccattttgaattttcatagtgaaaaattagtatcaggcaggtatttcctgtacctttatagcaccactccagaggctaagaggtgtggttgagaagagtcaggctgcatgtggaatggcagggtgcagaacgaggtacgtatacccagctttgcagaaactctcctgagactttctcttcctggtcattgaatgctgacacctggctaactagggcattgctcagagaagtgtcctcgtgtcccaccaacagcactttcatttgcatatactattgtgctgccatataaaggagaaatagtgaagatattctatattttatatataggtttatgtattgttgaggatgtcgatgctgtgctgttttggacaaaataaaagaattctgttttgaggctacattcttaacccaattaagattgtttacaaggtcacatatgacaacaatataatgtccttattccaaaatattttgaggtattgccaagtttgttaaaagctttcacgagatgtaagcaataatgtaaaagatacgacgaggttgtgagtgatcatctgtgactcagacatggagggagggattgttaagaccagaatcttaaaaactttgctactcagacgataacatttatatgatattctagattgggatatacttttttatcttttgccattaaagcctctttgatctaaaatatttatgaagccacgagtaatgaacttttgtgtaattttttatatagaaaatagccccaatgtttatcgttatgatagcccctgatggggttagaagataaaaacaacattttgtttgtttgtttgtttgtttgtttgactttggacactctcttttgttttgtgacaggatcataggtagtccaggttggtccagaactcatcatcctcttgcctcagtttcccaacaacctttgctaccattatatattatagacacacatcaccacacccagatcagactatagtcttagtcaaacacctgatctgacttttatcccaatgccaaaccttacttactttttatattatagtaatttgtttctttaaaatttattaattctgcaatttaatttctggttttttgtaggttttttggttttgttttgtttttgggttctttttttttttttttttttttttttttttccaagacagggtttctctgtgtagccctggctgtcctggaactcactttgtagaccaggctggcctcgaactcagaaatccgcctgcctctgcctcccaaattctgggattaaaggcgtgcgccaccacgcccggctgaaatttaatttctatctctgttcttttttcttcttgatactgagaattgcacccaggactttgtatatgatgcgcacgtgccctgtcactggtcacacccccaccctgagtcccagttgttttttacctgactcatggctgattgctcccaagcataggtgggtagctttcagaaaaaccaactaggaaagtcagtcatttttatttttttatcatacatgatctttgaaaactgtgcctagtaataaagaaatcctaaaactcactagaatcctattttagtatggtaaatgttcttggttctaaattgggttgttttgtcttggtttttttgttttttgttttgttttgttttgttgttaagagctagaaaaaagtaaaaggaagaaagaaatgagaataaatcagagatgaattgatttgaagaattctttttagattgttttgattgaaagtgtttgagtctactctatcctaagagtcgtgtgttaggacagccctggcagcctccctgtgaaggacacacctccctgtggatttttatccctagtggcaaagcttgtagccaaccttagtgacagatttgaatatactatgaatgcacaa

SEQ ID NO: 34677 - DNA, 4890 bp, Mus musculus
ataaacttacctaaccagtgtttaatataaaatgatacaaaggcttttttctgttccaatgagactctacatttttaaggatattttgtttatgggtctgttataggaaatacaactgcaagagataattgtatatatagtaatatttaaagtttatttaaagttgatttaagagaggaatgcctagatgtatacttttcaccagaacatatggaaaacattgaagagatgaaagccagttacgatcccgtcatagaaatcaccagggtaactaaacagagaatcattcttgtttagaatatttaaaggtagctatcttttgtaaggccaacaagggtacctttgtgatatttaaagggcttaaattttagaatgctagataaattactttttaaaaaacaaagcattttatataagaaaagctttgttttcagttttttttttttttttccaactaccaaatagataggatgtgctttagaagcaaagctcttcccgtgttgtcaggagtcgtagctcctcgtgtcagtctttgcatttccaaactctagccttcagagtgtaatgtcaggaaatcactaactcagaaacagaaatttgacagtaacctttactttatgcgtttaaatttttcaagaaatggatgtagataaatgttaatatccacttcccttaattggccattttaaacaatcctaatttttattttcagtttaatttcaagtttaaccacagttcattatattaataggttttattttgggtttttgtggagtgtttgttttttttttaagttcacagttttgctaagacaaagtgtgctaagctgtttaggtttgaccgtttggagtcccaatagataaacaggatccgtgttaagatacattccctttgctataaaaaacaaacaaacaaacatgcttgtgtttgttaaactgttttactaagagtgaagtagtcagggcctctgattcgctgagtcactggtaactcagcttccttctaactgctgagccaggctctcctgtcttataactcatccctgttcctttggaagctatgttaagtctttcactcctttaaaaaacaaaacaaaaacctcttattttattctcttagtctaattactagaagccacttttgcagagcgcgtgtccattttcagattaagctttagcctgttagctttggagtccctgcaaggtgcgtgaccatacagtgctatgcaggtggcttctctaccaggatcacagagaatgatttcttatgatggcaaatgaatgctcggtcctcaattttaactgaagagattttgatttgtagatgtaatgaacaggtgaattggaaacttgcattgtcctgcatcactcatctgccccaagggccttcaagctcggaagtatacatcttcgtgaaggagtgatttttgagttcttaactaggggtgggggaaggacctaggaaagctcacatggagcaaacagccccaaggtaggggaggaaggtgagttttcactgcactgctaagtgttgccatcagatgtctttttgtattttgatagtagaaaccagaaggcaatggacaaaagtgagggagtggagagatggtattgttgtaaacacagccatgaggaatatttataactaaatacatgttttaaatgagatcatcaaagttaagatttcttattttgcttatactagtatttatccctctttcgtttttgacagaatgtggtgacataggatagtttttatgtgaaagtcttcaacaaaacaaatttaccaaaatagcaatggttcagataaacaatgaagtggaatcgagccagtcctcaggctggttaagaagtaggctatagatgtttcactctggattatacataaattgagatttttgctgcaacctagaaacatgaattatgttgaacagggaatgatactgttactaccgggagttagactgttattaatgtatactaaagtgatgagcgagacgctttcccgatatcataaatgtatttttacaatagaaacaatagttcctgggtttggaagtagtcactgtagagtcagacagtgctgctggaaccttgctttggcagtgtctgaacagtgctgctgctttaacggcttctgcagcttagtagtgctccctctgagtgagacccaggccggctccagcagacacaggcttcctctgtacacaacaaaaaacgtaggagttcagaccatgattgaaaaacattagaattaatgtttttattaaaaatgaaagaaaaattaagtttttaagtgcctaatttatattcttgttttctaagtttattaagctttgctaagcctaaaagccctgactcagttgtgatgatttcctagtaaaatcaccaagaatcacttgaggagctagagtgtcatgacttttactgaattccttgttttcttaaatgccagtctgactacacctagaggttgacaggtcatcctgtgaatgagcgttcattaccaaagcgcatcgcccacccgctgaggagtcagcctctagctgccccaggaggggtggtagtgttggcttcgagatggggaagcattttctgcagttctgttttccagagagacccttttctgtgattagtgcgcttcctgtggtttgtcatgttaggtagcagttcccgggttgacagctgatatggaaggtcttatatattgagaatgcattacagttgaaggttgcactgcttttctgcccccgagagtgagtggcattgggtatttagaagtgaggtaataaacttattattttgtttatacaaaatgatggcttctgatgcttatatatgaaggtattgcttaaagaaacaacagtctctggtagggtaaaatctagttttgactcaagttccagtgatgtatttagtttatggatactggtgtctcctgttgcatcagctagatattgcctgcctctttgttaaggcacccttgtggcaccttacgttcaacttgaaggatggtatgtggcctctttgtgcctctactgtcttttcaaaagccattttataaaaaatcttaggtattttaatatttaaatatatatatatatttgtgaaagatacttttagaacgaactttttttttaacgttaaaattcctgtattcccatttttaagagtaaactaaagattttccaggcttaggactatctttttttcagaaccatgataagaaagtcagattgaggtaataaaccagagagttcggtgatggggaaagagatgtctggtgagaggagactgatttaaaggtgaaaacaatgactttgatgtaacaaattaactttttaaataaagtgtggttttgctcctgtgatttcgtatttgctgctatagtagctcactattttatagggctaacatataaatctggccccatttaaaactgaggtcctttctaatacaagcagcctagaaagagactgcgccacggtctgccgccggtggccaggcgttcctgtagctgatgcatgctttactagttgcctgcggctggcagcacggaggtcagggaagcttcctcccctgccaggtagagcattgtaactcatgggggctggcatctgggagacaggccaaagagggaaccgctgaggagagaatgtggaagcagttccatggagggctgtcccctgttctccaccgctctcctacaacagtactactccaactgtgccagtccccacgtcaccagcctggaccagttgtcatctcattcaagtatagctttacttggtgacagtggccatagctaaattacttggcatgtttgactttctacaatgacaaaaatggtcttaaatttttgttttgatttccttaaaaaaaatgtatacagtgtcataacttcatgttttataaactagtatctggctattagtattttacagaaaccatggttcttggtgactacataatatatatatatatatatatatatatttttgtgacttttttgtaaactaagtgccgtttcaacgttacaatcatttttagagttattgtaatcaatgtgaatatcatgttttttcaaatctgttctgagcctagtgtttgctttgtgaacatatgtgtattgtatatattctgtatagttatactgtactgaaatattagcttgtttgatatgagaaaaagtatgtattgagtacctttttgctagcctgattgcttaatctttttaaaaaaaggtttaaatttttttttaatctttaagctggcctttattaatggtcacaaagttgcagttagaagggatggacagggagaatctagtcttgagtgtctttggatagaaacatgagactaagatttgtttttgttttgttttgttttctcattaaaatatcttactgatgttttatgaaataagtctgctgttgttgtcattgactggtggttcctgagtgtgtgcacactggagacagtgagagtggacagcatttgtcagtgctcctatgtgtatgtgtaggtcccatcacaccacgcccagaccggggagcagaatgtaaggagggcagttagggaagccaggttcctgggtaaagctactcattggatggtggttgcctctaatatgtttttctgaaattgtttcatatttactattaattagatagagacacagtgctgctatttcagtggtgactgacaaatgggaaacaggaaagcagctcattgcagaaatgggtcataggggccaaagagaaaataacagtagcaagcacagtcaaccaggatcctgtcagttaggttcagagatgaagacagaggctttaataagtttaccaagcacttaaggtcagcaagcagtctggcttatcttgaacctgaacca

SEQ ID NO: 34678 - DNA, 1316 bp, Mus musculus
ttgaaaggcggaagctgggaccagaccagggagtggaggagccgtgcagaatgcgaagggaaagaggcagggtaaggaaagagaaaggcagggcaggggaagaggagggggtggggctaactaggccggagctggggataggtggggctggggagagcccggcaggggtaagcaggagtcctggggaagtcatgcttccgggagaggtcagttggccatgggagaggctacttaggttgaggcagctactaagagtttaggtaagggactactcacgcacaggattcggtatttatttatttatttatttatttatttatttatttattttgcgtagggtgactctggtggccccttgtcaagcgcggagaaagatgggcgaatgttccaggctggtgtggtgagctggggtgaaggctgcgctcagaggaacaagccaggcgtgtacacaaggctccctgtagttcgggactggatcaaagagcacactggggtatagcagcatggacagacagccgaccacaaacacccacagggatgcccgacatgcacacctggatacaggagaggaacactgacgacatttatgctgtggcctcccccccccaacacaacccagactgtgaactgcatccttaggactcagagttcttccaaagtgggaccccctcaagagttggagagagaacttgcgtgctagcggcccagcctgggggcaagggtttgatggcagccttccccctctagccctgagctgggtgaagatgatgctgtcccggagagctgcttccaactgtcattgagctcccgggagccctatgggaggaggggctcagggtcactcttttcaggaagcgccagccctaggaaccccagaaaagagtggtacctaaggctgaaattgttttgctgttgccaggggtgggtatttgagagtaaaacattttatttctttttaggtaatttgtttttcttgctatactactacacctccctcccccatcccctctatgaatagttttctttgcactaaactagaactaaatttcccctagtacagaccctgtgcagaccacagcgtcttgtcttccctaggccaagggctgtctgtccttggttataacaagtgctcacttgtaagccaggccctgattgcaacagaaacttggtcagaaggaagtttgggggagatgaatcatgtgactgtccaggactgaccctggccttgccctaccgggggttgagaggacaggcagtagtagtcatggtgacatgtcagaggaagagggagatgccaagtgttgtgggtttgcttt

SEQ ID NO: 34679 - DNA, 1224 bp, Mus musculus
acctgcctcgcgctgggcactgaggaggtgggaagccgtagggcccggaggcgtcggggttggggctggcaggatctccgtgggggtcaccattgctctgggctatcaatcagtgctccgagtgggtgacctgggctatggcaaggacaagttggagacttgtctgtccttggcctctgcacaaactcgttttagtcttcctggtcaaaggcgctttggatcttttgtaagggttgaactcagagcagagctttgtccacacagagtgtggagcccttgagaaggtggctgtctgggtagtggtgaagcatgtgtcctgagccttctggaagaagcctttagtaagcgggaagcagaagcctgagaagtctcttgaaagacctcagaagcatttcactttgctgcacacagtgggggagggcgttagttatcctgaaagacacacacgggtcgtggggtagtggtggcgccgtgctctggtgggactagcggccaggcttttttctgaaccgcagctagaggctggtgagcgaggcttgttgctctggcagaggcagtttcctggagccgagcctccccttccgccgctttttcatgcactccttctctgctgacttggagaagaccagatctcgggggaccgtgagctgggacttcacttctcaccccttgtaacagagtccccgcaacctgtgcttctgccctgcagtgagatgccacctgctgccgccttctccttctttctgtgattggggtgtttgcgagtccttagtaattgcctgcttggaactcgtgcctcctccgcaggtagcctgccgcttggtgtttgaccttcatctgtttttctctcattttcggtttgcccttccagacttccctttcgaagacgggtgctgatattgaaagtgggtcctctggtgactgaactcagtctcctgtttaggccacgtatccctagggtgggagccagggtggggctcaccactctagtccctgggctcctgatagattactattcaccaggaacgcctctttgccctcctcctaggttctcattcatctccatcacttgggttacgcctactcacttctgcggcttctttctcctgtgtggctggctcactctgtcttttttccactttggttgaacgaccccggtatcagtgctgggccagggactcactacccaaaggggctctcggggagcaataggatgtggttggt

SEQ ID NO: 34680 - DNA, 2606 bp, Mus musculus
tatgtaaaaaaaaaatagatcttaaaaataacaaaaaaataaagttcagtaaatgtgtcagtcagtcacagtgtgcttcagtttcacagcaacttgaaaaagggaacagtactgccaccttgtggtaaaaaaaaaaatgacagaaacaggaatcccaaggacccaactgaaattgtcaagtttgttgacagtgtatttgtctcaatgggaccaagctttcagagagaagctttgcctctctgaccgcctccctcccttcctatgtccttgacaccagctcctgtttgatctgtccagataaaaagcatgctgggctgctttgagtccacgggattggacagggaatagcctgatgtcctgatgctcagcaggcctcttcagtatcccacagtgacctgcggtctttgttcctacaggttgacccaatgctcaccccagaagagcgtcacctgaacaagatgcagaaccatggttatgaaaacccaacctacaaatacctggagcagatgcagatttaaggacagcgtgtgtgacaccctggctgaggctgctgcaggtgggctggaagaggctcagcgtttgtgcttgactgctgaccaccagtggtgccagaaggcctcatcctacatcctgctctcctggattgttaagactataaagtactactgtaggattgcaatttccattcttttaaatgggttaaaaagatgttaatataacaatatatgatatataaaccttaagtgaaatgaaagaaaaagatctattgcagatatctgatggatgtagttttctttttttaaattagaaatgccacttctattgtattgtctcacacatgctctatataaatgggaaatgttgatttttttgatgatagactatatacacaggctgttcccgttatgtaagtcagttcttcaggctcatttgctgtgctggttttactattatttgttttcaatgtataaaggcagtatttcccttttcaggttgctgagaaatgtaagaggagctgaagtacattgtatgcagttactgactgctttaggcatagtctccgcagaagcctcgtgtgtccagtgctgggtgtttgggtgcttctgtaccagccgtccccaagcagggctaaggcaccttgaactagccagatgcaaacatagattcactgtgctttcctttcaaatccagttcttccacagcaactagcccatagtcagtctgtgttcttccacagttgtttacggtagccttttcctatccacttcccttaccaagtgtatccaagcgtgcacccacctcctcattggatggctccctccatgcactgaccctctgcctgcctttgtacctcactcacctccaccgctctccagcccctctgatggccactcagagaataccataataaacatggctgaggacccaggagagttcacgggaggcttcatcatatgaaaggacaatgttctgggttgtgcatgaaattggatctgtagacactgtggaaacgtttgaaagtgtttgtttccttcatatgaacctgtaaaatgctgtgtagctggagttcacgctcacagcctttagcgctttgttgcttgttttgttttaatctgaaggttctggtaacctgtttttgtttgtttgtttatttgttttggtttggtttttgtacttttctgtgactcacctgcccttccttccccccttggccctagccgtgcctcgtcccactatgcacagattgaaacttcacctacaaacctgttagtgtgatctgtggagaatgtacagaacttaactacatcaataaacactttaacgtcccctgagcaccttgtgttcctgaccatggcttcgatctatgctgatggagcgttctaggcctgcttttggggatgaagggtgtctatcttccttcagtgaagagttactagcctgtattacagtggccatagtaagttgaatcaagagctccgttttcattccaaaaagaaggagaaagtgactggcttgctggctgttgtgggataatctcagcactgtgggggaggggttgctcacacggaggactgatgaggtgacggccactattgagcgggtagcaagaccctattttacgcgcaaagaaagatgaaggaaagcctgcctgtggcattttgcaaaatttaagtcaagacttcttcccactgttaagaataatgtcaatagagcttatggctgaattttcaggaagctgtccatagccgctgcggcgtctgagcttaagtgacttgccactagaagtccctgtgctcagcgacttgggcttttagctgcttccagggctttgggcctgagcactgttatcactcagtcttaaatactatgctacaagagttgatacatgttatgaaacatgcagttactggggtcataccgtatgagtttctaagccagtaagcatagggtggggacatgctgccagcagtctgattctctgttaacattcaacactgcccagctgcttctatgatgtcccctcaggttactgcccaagagagtcacaaagagagagagacctttatatttgaagtggctttaaagaggtaccactggaccctcta

SEQ ID NO: 34681 - DNA, 1173 bp, Mus musculus
aggcaagcttaggtgtgcagaggcacacaagcttagcaggcaagctcgggtgccacttcattgttctgtagggaaaaacagtctttcttacgctgatccttcagttagattatcctccagtaatttgtctttggtcagattatggaatactttctatcccaggcgtaatggcattggatagtcttgtcttgttaattcctgaaactctttaaagtgattcttagatcttaagttttagttgtttttgtctaagatgaaattataaattaagaaagacttcaagttcttacttaaaataatagtatgataacttcttgacagaacagttaacatgtccagaagagaatgcattacgacctaagatttcttctggatgaagctagagctggagggagcttgtgaaaatgtcctgatgtgatctgtggatttcttgtaggcatgtctgactgaggggctgaccttatatagctatggcatgctgctgccctgcggggtagaccagttccatggcaccgagtatgtgtgctgccctcagacaaagactgttgactcggactcgactatgtccaaagaagaggaggaagaggaagaggatgaagaggacgaagaggaagactatgatcttgataaaaggttaatttgtttaaagtgttggactcattttgtctggttttgtttgatttgggaggggtggaggcctttaaatctgtgcttgtgaaataggggtctcactttgtagtcttagctggcctggaactccttatacagaccaggctagtcttggatcagaaatctgtctgcctttgtctccagagttctgggattagaggtttacgacacatggcaggtctggtttttagcctttctgtaaaagtggctgttggtccctcattgctagataaggccatgggtttcttttcttttctttttttctaaatacaaagaatttattgatactgaatatgctgcaagggatagcgggctgagaagtcttagttaggtctctactgctgtgataaaacagtgaccacaaccaacctggggacttcacctcacagcttccagtccttcatgaaggagggcaggacctggaggtaggactgaaagaccttgaaggagtgctgcctactggcttgctcagtttactttctcctcccctcccctcccctcccc

SEQ ID NO: 34682 - DNA, 1147 bp, Mus musculus
agataaagggatgggtgtgaaggaatattaatgcagttagttctgagaggagcagttgtttgtgtgatagtggtcttctatgtgttcctgtttgggagtcgtatttgctgtggatctagtggggaggtgtcgcccttttttttacgacgcattccagttgtacccataagacatcttcaaagcctgtattttaacaacttttgtgacatatttaaaaataattattgtagagtgaatttatcactccagatcagggacacctaagttaatttcaaatgaagttaactaatttattttatttacatttctaaggaaaaactgggtctgtggtttaagatatagagtaacttttgggtggtaaagacgccctcctgaaaagtaatcatttggtttgaagtcactttatttattacgtagatcctgtgcttccctcttgggatctcattcatagaccatgtctgaagatttgggcatgaaaagaacctgggaaaattacctcaaaaaatgtgtggaaactgaaaatggactctgtatctttgccaacaaaaaggtaacagtaatttcaacatgaaatgttgactccagtcacgaaatgcaagactctgttcccccaagtcctgtggtgtaatgactgtaactgtctcgggttttccaaaaagcctgtagtgttgtaactatcccagggtcttatccagagagacttaggaggtaaggagcggtagaccatctcaaaggtacagttggagtttttgtaatttatatttgccctgctggagctgggcgtgggagtgcacacctttaatcccgcgcttggaaggttgagacaggattctctttgagttggaggccggccgctcctacaaagagttcaaggactgctagggctatacacagagaacccctgacttgaaaaaactacacaagtaaataaataaatttgatctgttggattctctttaatgtgagccagcaaggtatctcccctcttctcaggaataacccagtgattaaaataaagccaatcactgaaggaatgttggttttatgccagttatttttaacttttaaaatatacagaggaaaatactcttgaaggaccttttcatctctttctctttttttggtccttatatgaaataagtagatc

SEQ ID NO: 34683 - DNA, 1141 bp, Mus musculus
tgttaaagttttgtaattgccatgctcttgagtggtctctagcttctggttctgcctgctctctgttgctatgataaagattgtagaaaaagcaacttggggaggaaagggtttatttcagcttacagtccagccttcagggacatgaggtataacatggaggattacagacttgctcttcatggagtgctcatcttgctctctagatcacccaggaccatggccaggggtggcctcccatagcaatgactaatccagaaaatgcctcacacacagagatcagatggaggcagtccctcaagaaaggctttcttcccagatgacttagcttgtgtcaccttgacaaagcaaacagcacttgtgggaagtagactcagctgggttccttgtacagcactgcagctaatttaggaatttggcaaactggatatacacgccctgctctgacatcttggaattgttggtaaaaaagagaaacttaattgtggtccatcttttcctctccctcagctggaggatcgagttttggactggcagtcttctccagccagctccctcaacagctggttctctgctgcccccaactgggctgagttggtgttgcctgctctgcagtatcttgctggagaaagccgaggtgaggtcttgtctgtgaaattttatcatgttttccctcttttgtctaaattcttgcactagatttctccattttcatcagacacaccttaggtgtcttttctgacacacagaaatacacacacggcatcaacaacaaaaccaactcgagctgtgccagagcttgtgtctgtgttagtcttgtgtctgtattaaggtaagggttatgcttgttcatgcgatctatttcttgcagcggttccttctagtttctctccatttgttgaattcaaagagaaaacccagcagtggaaattgcttggtaagtagtctagactttgaagaggtttgttttgttttgcctacccccccacccccgctttttttttttttccttgatgagaggaatcaatgatgggaagattgtcactgagaggagtggctagagagccaggcaagcatggagatgtgccttagcgtttctgaggaggaactatatttcttgttaaagtagggggaagggaga

SEQ ID NO: 34684 - DNA, 1229 bp, Mus musculus
gagaccaggcccggtggatctcggccgacagaaagggagcagcaggaggctgcatcgttcttctgagctgtcctgcttgaggcagggtggtggagagtgatggcaactgcggcctaggttctgctgccacgctccagagtgaagctctgaaaggggtccctctttagggctccagggataatctgtctagtccaggaagagagaacatcagagtcttgggaggtcacagtcacacaagccagggttacctcccgagtgttggatgtccagggagcaggcctgccagttgctgagtgggccggcagggaataagcctcattctatgtgaggttttactttttagtttctgatcctcttggtgacttgttgagatgtgagttttgtgtccagaaaatttttgtgtaacttatttttttaaagaacctactatatgtcttttatcaaatagaaacctgggctttagtgcccctaaactgatcacttaccccttcaaccagaatgagaacatagcaaggctcttagtaggttggtggcttacttgatagtggagaggttatatagtaagaaatgtaggccatgaggtagcatggacccctcaagtgggactagttcagcacagtgtactgaatatgagtgtctgatcttggttgtccctgcgtcttctcctgtggggttatcctcaacaagcctgttcacatggaggttcagagctgttggacaagagagtagggaaagccggtgggatgctgctctcagagcacttgcttacagcccagacattgcacattctccttgctgtacaacagccattgcaaaccagacccttggagctggccacctgactggaacatagaagaaatggttaggtaggggcaggggtaggcactgcctggcagtgccagctagaggagaagtgagtaagtttggtgtttttattcctggccatttcacatttcttagccaccatcagccacagacagagctcagagggtactttacaaagtccaagtactttatggactgcttgtagcttgctgtggtgcaggggtgggtgggaaaacctttctgcagggatagggcttccttgtctctttgtgaaagtatccaaattattaaaaatgtatctttaatttctgggcctttaatcattgtgttttacggggaaacaactaggggacatgtagaatggaaatgctggtttaagtgggaggtgtgttgaaaccggttca

SEQ ID NO: 34685 - DNA, 1135 bp, Mus musculus
agccagattgtgtcttccatcactgcttccctcagatttgatgggccctgaatgttgatctgacagaattccagaccaacctggtaccctatcctcgcatccacttccctctggccacttatgcccctgtcatctctgctgagaaagcctaccatgagcagctttctgtagcagagatcaccaatgcctgctttgagccagccaaccagatggtgaaatgtgaccctcgccatggtaaatacatggcttgctgcctgctgtaccgtggtgatgtagttcccaaagatgtcaatgctgccatcgccaccatcaagaccaagcgcagcatccagtttgtagactggtgccccactggcttcaaggttggcattaactaccagcctcccactgtggtacccggtggtgacctggccaaggtgcagagagctgtgtgcatgctgagcaacaccacagccattgctgaggcctgggctcgcctagatcacaagtttgatctgatgtatgtcaagcgtgcctttgtgcactggtatgtgggtgagggcatggaggagggtgagttctctgaggcctgtgaggacatggctgccctagagaaggattatgaggaggttggtgtggattctgtggaaggcgagggggaggaagaaggagaggaatactaagtccattccttgagcccctgtgtcgtcaaactgctccagtattagttgcaggcactgatgcttctgtgctgtttccattctgtgatcatgtcttctccatgttgtacctcttaagttttccatgatgtctcaaagtaaaagctttaagaaaagaaaaaaaaaaaagaagtctcaacaatgttaaaaatccaaagttcaaggtctcttctgagatccatctaatcaatcacttaactgtaattcacagagcaagacaggaaaccagctgggcaaactccaaactctgcatctccatggctgataacaaagtggtcttcagatctccattcctttttcatctttgttgactgcaacaaacttctttctcctgggctgggttcactcccttctagcagcttttctcaacagatagcccatggctctgacatctcaaacatcttaggttctccaagtcaacttcagcttttcagatt

SEQ ID NO: 34686 - DNA, 1197 bp, Mus musculus
ttgtgggttcctttccttcctccttcctctcctttcacatcttctctgtcctttcagtcatccgtgtgcaacaccatccactgtgaagaccaaacccctggagtcacccttgactttttctctgtatcgaaggttagggctcgccaagtttaaccctcgtggtacagcctggttcagacctcatcttaattctctttcactgctaacaatgtaggctaagctactttctctcttgtaaacctgccaaaaatttctctgcccctgctccagactctgtcctttcccttacattccttatcacaggggccgaagtaatgataagtgtttgtcacatcttagcattctcctattaaatgactccaatacacttagtacagaaggcaaaccataaaattttaacacagaagcaaaacctttagcttgaccggtgtaagtggttctctagcagggaaggttttgcctataagggacattaaatagtgtttagggacagattggaattgcttctggcacctagtggactgaggtctggctctgctaagcatcctacagaatacagagcagtgtcaacaataacatagtgtgtagtctagcatgtctgtagcacatcgtcagatccccagttttcttccttgcttgtcttggtcattacgttatagtcacaatgattttccccattctttttaaaagactagtttgtcagtttatcagtcagtctatttagtgagatcggggatagataggatgcatggattatacatggtaggcaagcactctactgctgagcaatgtagacagatttttaggttcatagcaaaatggagtatgtggtcagaaatgtcctataaaattttccctactcccccatctaacagctccattaactagcagctccagtatggtccatttattgcagttgatgagcccataccaacacattatccaaaatagtttatttttggtgtacaaatggtaatgaaaggtgtattcaccattataccatatagagcagtgtcaccgctgtaaaagtcctctgtgtgtacatgttcctctgcatatgtacctctccctgcacgtctttttactgttttcatagttttgactttttcaaaatgtcttatagttagaatcatgtactgtgtagcctcaccccctttctctttgtgtgtgtgtgctcatgtggtacatctgtttcat

SEQ ID NO: 34687 - DNA, 1153 bp, Mus musculus
cttctgtgctattggatcagagagatttctgtttatgctgtgcctctttacctgctcattttacaccttggctgtgtttacattttgttattattgttatagaacatataaacacctcttcttcctccctccctccatcctctccctccctttctccctcttctccctccatcctctccctcccttattccctcctctccctctttctgtgtgtgtttgtgtgtgtgcacacatgcatgtgcatatgtggtcattattgtgttcatgtgtggagaccagtgtttgatattatgatgtctgactctgtcactgtcctaccttattttttgagacagaatcttttcactgaacctgaagtttgaagtttgggctcgacagagaggccaggatttacctacccctgctcatagtgttggagtttacagacatgtgtaaccatgctcattttttaataagtatgggtgttttccttgcgtgtatgttggtatgccatgtgtatagcttggtgcctaaggaggccagagagccatcagacagctctgtgcttccatgtaggtgctgggaatggaaactgggtcctctgtaagtgttatcagtattctcaactgttcagtcatgtcttcagccccacagatgacttcataggtaggttctagggaatccaatttaggtttttatatttctgtagaaggcattttatcaactcaaccacctcaagctagatataaatatttttatataaggtttatctgtgttttgtgatttttttctggctttataaaaattgttagaactctatcaaattatactgaggacttttctactgtaatattgttgtgaggagtgtcctgtggtattctgtgatttaattcgtagatttaaatccttggtttcctgggcatttattttactgtacagagtgaggaagactaactcacagccgcagggtctctgttggatgacagggatttgtacagggctgctgtgaccgtcctctcggcttggagtcatcacagagattgggatatactaggatttgtctcagtagaagctcgaatattttcccagttgtttttatgtaaaatgtcaggaaatttttccaaatccctactgtcagaaacagttggttttctaaacctgttttcagatttgc

SEQ ID NO: 34688 - DNA, 1196 bp, Mus musculus
aaggctttcctctagcaggcttgtccagcctttcgatattacagtatggtgttgtcatctacaaagttcatactcaagaaccatgcaatcaaattacaaaattaaaaagtcacataatggggactgacaaatggctcagcctgtaaaggcacttcctgcccaacaataaaaacatagccactttaatttgatccccaaaacccacacaaagatagaaggaaagaacaaactcctacagttatagtctgacttccacaaacatctttggaacatgtatatacatacagcacatacgcacacacatacacagagcagtaataataaaatgtaaaaattaagaaaagataattttgagtatcatacaataaaggaagaatagtcaccactaattttcagtaatataaatgcaaaatattgcacagtgaactaaaagtaaattaatagttaagctatgtactctgcattttcaactcacagaaaaacaactatctgaaaaatcaaaggcaaaacatgctgtagaatagatatcatcatctagaatttcttcacaaaattacaagattgtaaccttagtagcttttcaaagtagctcatctgttaactgaacaaggaaagctgattatcaatgaagtcaactcaattatgattaactatagcagcccaagaaactcatccagaaaatacaaactggcttaattccatttagagaaaattgttctttgaagacttgatataatatcagcagttggtaaaaaaaataaaataaaacaaaataaaataaaataagtgaattgtgttccttccttcttgatgaatataaatgtaaccaacatggctcagacactaatgagtttagaggataggaagccttggcctctgggagggatatgtatggaacatctacaggacagaatactcataaataacttaagattagttcaatacaacccaaagtacagtttacttttacctgatttggggaaaaatatgtgttttgctgaaaaaggcttggttggacatatttcaacatctatactgaacactaaaatatttagtaacttatttttgtaacagtcttggtatttctaaaggaacgtaacctaaaattatgaggcaaagcatggtttatgaagtcatttgaaaggctagtattcctagagtcatatgtattcacaagctactatatacacttttca

SEQ ID NO: 34689 - DNA, 1160 bp, Mus musculus
ggaaaatttggcagaaaagccacagatgtgtcttttaataaacacattttgtattttcagtacaaaggtacaaaacgaaagtcctgaaattagaagctgtagaatacggcctcatacgatgaggtattaaaagctaaaatccccacattaggcagtagctgaattcctctgtgaaaagtgccatcatttcagaggtaatcttccataccctcagtgatgaggtctctagagctattattattattattattattattattattattatttggtgttggcgatggggggtctcactttacagttctggttaaactgggatcctcctgcccttgcctcctgactgttgggattaaaggtgtttgccactatctctacctgatgtaattattaagtgcctaaggatctctaggtttctttttttccctcttagaaaaaaaccaatctatatgagactttgtaaagcaaagagttgctcttccctctggttatggtgagtctctctttttcagtcggttactcagatgcttacagcttacctgtcacgcctttcaactatcgctggcaacaagatcaactgtgggcctgcccttacctggatggaggtatctgtctgatcagctctgatgaaatcttattctaaaattatttgcttaaggcatttattagtaatttgattatagatgagtttcacaaataaagaaacaaagaatgtactcataatccaggaggattggtaactgatatttttaattttaacctgaatgcgtatgggtgttttacctccatgaatgtctgtgtgctctttatgtgcctgctgccccaaatggccacaagagggcttcagatgccctggacctgaagttatacatggtatgagccaccctgtggctctgggaatcagttcttctaagagcagccactgctcttaaatgctgagtcatctctccagagtgactggatttttggatagaaaatctttctctttatttttcaaaaaaataattttatcatctctataaatctggagattgttagacattgttatacctattgttatacatatacagcgtaagctacttgttttttcatttgcttaataattgaaaatattttttagtaatttatgagccaataaaccacccttttaaaggtaccaattt

SEQ ID NO: 34690 - DNA, 1101 bp, Mus musculus
catttctaagttggtcctcagcaccttgctttcatattttagcccctgttttacaaagaacaaatgtctttaagtagagattcaaaaagtagacattaggatgtagacaggcttgggtttcatgaaatcctgatgccctcatacactttcacaggattaggaaagtagttgaacttcttaggtcttcatttcatcagcttcttgtgtggttatctggttttaaaggacatctaactatacacaggtagctggctcttagtctggattcctgccatccctctgtccccactctctcctcgcctcagctgtcctatactgtcttctttgtggaggcttattatcaatgtcttctttgcactttttttcatcctgaggtgcacgtggtctttgaagctatagttcttgttgctccccacattagctcccatgccttgcagagctgcatggaaggctcctatgtggctcccattgtgcctctccaggctgttacattctttctattgtttgttcatttcttgttctgtaggaagggatagagccttggttatcttagtactgataaactactttttgtttcatagaaagaggcctcagaataagatgaaaaaatctcccgttggcagctggcgttcctttttcaatttggggaagtcctcttctgtctccaaacgcaagttgcagcgtaatgaaagtgagccctcagaaatgaaagccatggctttgaaaggtaagcactgagctgccctgttctgggtagcagactgcctggtggcttctggcacctaccactgtgctcacagccaacttctctgggtgtaccttcccgttgccatcatgacacacctcactgtaaagcatgcatagttgtgtggcccagcttggttgtctgcatgtgtgattgcagctcgtaagatagtatcagttacgtagagaagaactccgtttcttaaaaaaactgtgtagatgttacacacacacacacacacacacacacacacacacacacacacacacacacacaccagtagtgcatttgtgtcattgcttctctagggtaacatagcttgtatagtgctggtaataattctcctgtgttatgta

SEQ ID NO: 34691 - DNA, 1523 bp, Mus musculus
ctgagtcttttcctggccattcctgtggctttgctgccccagttcccccaacacggacaatggagagcaagatggctgctgccttgcactccagcgctgcagatgccaccagcagttcaaattaccactcctttgtcccttcgtcagcctcagtggatgatgtgatgcccgtgccactccccgtctcacagcctaagcatgcttctcagaagatagcctattcctcctttgctaggcctgatgtcaccgcagagccctttggtccagaaaactgtttgcatttcaatatgactccaaactgccagtttcgcccccagagtgttcctccacaccacaataagttggagccacatcaggtatatggtgcccggtcagagccaccagcctccatgggtcctcgttataacacctatgtggcgccgggaagaaacatgtctggacaccactccaagccgtgtagtcgggttgagtatgtctcttctctgggctcctcggttaggaatccttgttgccctgaagacattctaccttaccctaccatccggagggtacagtccctccatgcacccccaccttccatgatccgctctgttcccatttcacggacagaagttcccccagatgatgaaccagcctactgcccaagaccagtctaccagtataagccataccagtcctcccaggcccgctcagactatcacgtaactcagcttcagccttactttgagaatggacgggtccattatcgctatagtccgtactccagctcctccagctcctattacagtcctgagggggccttgtgtgatgtcgatgcctatggcacagtccagctgcggcccctccaccgcctgtccagtcgggactttgctttctacaatccaaggctacaaggaaagaacgtgtacaactatgctggtttgcctccacgcccacgggccaatgcaactggctatttctctggtaatgaccataatgtagtcactatgccccccactgctgacggaaagcacacctacacctcatgggaccttgaggacatggaaaaataccgcatgcagtccatccgccgagagagccgagcacggcagaaggtaaaagggcctatcatgtcgcagtatgacaacatgacaccagctgtgcaagaagacttgggagggatctatgtcatccatctgcgcagcaaatcagatcctgggaaaactggacttctctctgtggcagaggggaaagagggacggcacccagccaaggctgtcagtcctgagggggacgagcgtttctacaggaagcacccagagtccgaatttgacagagcccaccatcatggagggtatggcagcacacaggcagaaaagccatccctcccgcagaagcaaagcagccttaggaacagaaagcttcacgatatgggttgtagcctcccagagcacagggcgcatcaggaagcaagccataggcaattatgtgaatcaaaaaatggaccaccttatccccagggagctggccagttagattatggg

SEQ ID NO: 34692 - DNA, 2763 bp, Mus musculus
actgtcaataattgttctcttgacagggtgggagctcctaaggagctttctttgaaagatgaagttcatatgtattgtcagtgaactctgctaacatagagcatcagtagtgcttccagtgtgctaccagcctgcatggcccacaacaagatccgcacactttagtgccagtacagaatcatccacagtgttctccttaagaaaggacagcgtgtctaactacagaaatccgttttctagggatagaaatgtacacactattatgtttctgacctagagtacagatcccctgggaatttgtaggatccctagaagttgtctgttaggcaactgtacattgttcgttgttcctcagtacacagtccgtctcatccactggcattctgggggtcgcgtggtttggctcccctcattgtgcggtcacaggcttgctgcatttgtcaccgacaccagcatttcagaatagttctttctaactctctagacgtgttaaacatgtgaatgcccaggactttgttttgaaagttgcattccttactgggtttgggatgtggcacctctggcccagcttccctctggttttctcggcccatctcaccctagacagtggagactggtcaggcagtcctgtgtttagattgagttagattggcatttcattccataaatcatgatgatacttgagttttgtacatttgtatcttttaaatactccgtaggagacacaggagatttcattccatttactggatggttgctgctctggcttttttggattagagtatcttttatttagagcaaaggaagaaatctttcaagaggctaaagtcctgctgctgtgactgctgtgaatttgtgaaagattaggtttatggcagtctttgtaattaaatcatatagttgcattttaaggttatatatttagaattaaagttttaagaacatgctcatatttggagatagtctacgaggttttctttatttcccagattgaccagagagtaacaatgaagtccaaagcagatatctggaaacaccaatacatgcaaaggtctatgagaacttgggcatctgcattaaaagtgcagacctgactatcagagtgtccggaaacctgatgggtgccgccacgtggcatacagatgtgtagatgtgttggcagacaccttttttaaaatttttttgtagccttagtcatcttttttgtcaaggaggcaactcattggcctctggaagactacaccagccctgaacactatccttagcagcacagatggagggatagaggccagtgccacagtgagtgagacaagttgcttctgtaacttcaggccttgcctgaagagaagtgctacaaggtccaggccaattttgatatttgtggattagtttgtcacacgtagtgtttgctcctgaaactaaagtctcttttataaatactaaggttgattccttagaacaacttctttattaataacatcctttgggttcagaaatgtcagaaaaagtattttaaagatagaatcataattcagattattggtataattatgaaaacaaactttagatgaagtctaaagtgatttactgtatgtagcaccagccttaactttggattcagctattgaacagctttgcccacatgtttctctaattctgtgggggcagaaatcggatggcaaatcactgtgagccaggttacctcagtgtcgtccgcctcgtgtgtgacctcacaaacacaggaactgaatgttattttcaagtgttggcatggagcgttatggtcatggaagtggaactgccttacacattaaacataatctcaccccactagaactttttcagccatgtctccagattttagcttttgggcgaaattccacggtttggttagattgaagtagatgttcctagatagcagtctaggagctcagctagaagctccaggggcatccatcatgttcttactattactaataaatctaatctgagccttatttcttactgagttcagtttcttttaaaacatacatttatgtattttaaatgctgtttggagaagtccctgagacagttccaagggcagggcctgcacatttcttacaatggtaaaacagtttttaaaatgtagggtcaggtttaaaaaaaaaatcccaagactaattctgtgcagaggagggacgtggaaggtgagcagagcaggagagccggttgtcagtttggaagcagcagtgaattcagagaaggttcctgtaaagtccatttctctgttccagccctattggtcacccattcagtatgatggcaaagtgtcacctgagcagagagtgcaagaaagtaataaagaaagctgaagtatgtcagaaagttacttccaaatggttagaggcatgtgatcgtcagtactgtgtgttacggaaatgtcaagaatgaagtattttaatgtatgcaagataatgttggtgtgcacagagggtcttttccttatctgattagtactgttaatgttcagagatttaaaaaaaaatgattgtttttacagtttagattctgagatagcgaaacctgattttcaaccatgccctgcatgagagacgcatcctaggaagtcttagatcatacctttgagttctttaatttatagagtgttttttatgttttaatatttttgtgaactggtgtaaattgttaatgcatataagcttgtgtatttttgtaaatagttttgtgatttacttcttgccccctgtgtaaatatttaca

SEQ ID NO: 34693 - DNA, 1151 bp, Mus musculus
tggagcggggccgcagagggtgaccaagccttcaagaatgcgtgcagaatcagacggactttcccgagactgtggcagtagccccggcatgccagggacaggctcgccagccattcttagcagcggtgggctgaggccctcgccccgcgcgcgcggaatagctggagcagcgccgccgggccaggctcgcccgcccttcctttcgcttttgggagacgggcggtgattggctgcagatgctaagccccgccccgccgccccgccctcgccgcctcgccgagtgggcagggcagcggctgggaccctgggcctgggctcggtgaggaacgccctaaagcggaggcgagctgcactgcgccagcgccggccagccgtgcgagcgagcaagggagcgagcgccccggacggaggagggagcgagcgcccgggacagaggagcgagcgggcgggcgaggcgcgggcgaggctgggacctaagcgcgctctctgctccgccaagtgccaacttcgcgcggactggctgggcgcgcaccttcccgcggggcggtcagcgggaatttgagattttagggttgcgctctgtccccttccactgggttcaaaaatccccattaaaaagcaaaacaacagttacagcaaacttactctcatcccgccggccccctcaactccgggcaccatgaaggcggccgtcgatctcaagccgactctcaccatcatcaagacagaaaaagtggatctcgagcttttcccttccccgggtgagtggcaacagtgaggcccccaccccagctccgggtccccttctgggctgcgctgctccctcaggagcactggatgcagaagccaggaggactgttggtggcccaagacccttggctttttttgggggggggggggctgggtgtatttattttcacagctgtgtgttttgtgactaatgggaaaacgcttatagaatttccagctccctaattccgttgtttgaattttcccacataagcgagaaacttctggtaatattccttaatgttagcaaggggcctgacactgtctctaagatcacccccaccccgtcccaactgtgtctccccagtattggagcttgatgggaggctcttgtgaagtgctgaaagggtgtctggctagct

SEQ ID NO: 34694 - DNA, 1180 bp, Mus musculus
gcagaagtaatgagtttctaagcagctaagatcctgtttacatgcaaatatcagcagtgacaagaagagacacggtacaagaattacgcaggaaatttggtgtaaaacagaattccctgtaatcaaatctttggggtggctttgtaatggtttggctttccacaacaagtcaacagttatatatgttgacaccatctgaatggctctgccccagagtgaaccctgacttcagtagatgccatctgtctaggaaggaagaatcttctcacaaaacaaaggccgagaaggtgtttgcgtatgtatgcttatctcttcagaggacctgcatataaatttcagatctgtgatatttaggcctttgtcattaactctcaaaaaacccagggaatattggaatgtaaatatttctactattagtctgtgaaccctttaatatatattgctctgttatttttttttaagatttatttatttatttatttatttatttatttatttatttattatatgtaagtacactgtagctgtcctcagacactccagaagagggagtcagatctcgttacgtatggttgtgagccaccatgtggttgctgggatttgaactcctgaccttcagaagagcagtcaggtgctcttacccactgagccatctcaccagccagctctgttatttttagaattaactttaaaccttgcaatgtagtgaatagacgctactctctcttatccaaagcgtcatagtttgaatgagagatgtctttgaatactcggtcttcagttagtgatgctgcttgggcaaactatagaacttttatggggtgaagccttgctggagaaaaaacgacattggaagttggaagggggagggggagagctttattaagattattagattattaacttattctacttcctgttctctttctttctctatctggaacaaatatggtctgccaggttcctgctctgactagcatgccatgtcttccccaccctctggaacttcttccccaagagccttctggaactgtcagccaacataaactcctccttacgttgattttggttgggctattttatcacaacagaaaacaaaataatatattcagaattttttccaaagactcttctttagaacaattttacagcaatcctggaaggttagaagacatagaca

SEQ ID NO: 34695 - DNA, 1154 bp, Mus musculus
ctccctcactggaagtctgcacttctcaagcagaagggttaagcctctggggttgcttgcagtgataggcagccactgatgtctttttagtcagtggcctttgggccctggtcttcagtgtcagcactagggtttgtttgtcctctggggtcttttttggcacatgtcagttttgtttatataaaatgaagagactgtctctctgatgatgggtttaatgaaaggcactctgctttgggtgtgggcggtccaggattatgtggtaactattgtctgttagttacctggatattttatttttctttttggatcttgcaaggggaaaactacaagtaacaagttttataaatttaatttaaattgttacaggttttcatgttcaggacaaataatttttcaaccttcgatgatatccttgcagcagtttgttggtaaggtgactttcacctagggcagctgttgcatgccaatttttttttttgtgtgtgtgtgtgaaaacacttcagaattgaattaaaagatgtaaatttaaaattggttgtgtatctaatatgccccaggttcagtaaataaacaattctttttaaaaacagtaaaaaaaaaaaaaaaaaaaaaaagaatgcagacataggattcaatcagtgtgtatttaaataacataagcatagatgtctaaattctgatgcatgttattcaatgaaagtcagtaaccttgttctcaccacatacaggcagcacacagattagaggtctaaactatggttcatgatccttccttttcaatgtgagattaaaacacaatatttttgtacttctagagaaatattaaaattacaaaggatgaccactgatggtataattatagcaaagacaaaataatcaaattgatttatctagagtctcttctataaaaaataacctatcatttgcaaacaaggatttctcatttatttttctgagtgcccttttgttttcttcttttcttttattgctctagataagacttcaaacactatattagaaaggagtggagagaatagacactttccttttctttgatcttagtggaaactctgaatttttctttattagcatgatcgttattatatatatacaggctttattatatttaggtaaatttcctccatgtgcag

SEQ ID NO: 34696 - DNA, 1220 bp, Mus musculus
tttctaaagacagagtgctacccctcatttttccctggctgtctccacagggatcaggccataatgtctcccaagaggctatcgccatcaagcggatgctagagatgggagctgtcaagaacctcacatacttctgacttggatgggagctgtaacaccttggttccctactttgccatctgagtaggccctgtctacagcttagaggttcctggtgccagtacaatccaattgaactcaccctcaatggagagggtgttctggggctgtccaggtctccagagaggctatgcccctgcctactttggtggatttcaaatccagacagggtagtcacaccgaggctacaggagcctggctaaaggggggggggggggtgctgttactgtggcatcccctctctcagccagcacaaagagctgttttgttttgttttgttttgtttcgttttgttttgtcttgtattgttggtggtggttggttgggttttgtttgtttgtttgtttttgtttgctttgttttgttcttgagacagggtctgactgtgaaaccctggctaatctggaactcactatgtagaccagactggtcttgaactcacagagatccaactgcctttgcctcccaagtgttgggatgaaaggcatgtactacgcctggccccaacaccaagagattatttaacattctatttaattaaggggtaggaaaatgaatgggctggtcccaggatgttcatgaaagggacacaatacagtgttctgcccactttttaataaaatttacatgtgattggcctgttaaggcccaattctagagctggcctcccagaaagatggaggcatcaagagtgggagggtgtcctccagagagaggttgctacttcccagcaggcatggggggagcattgacaagggggttccacctagaaggggcctcaccttgaaaagaggttgtaaaagaccattaaaatatttttttttctaaaatggaagcacttgtggggctctgtgtcctttcagattggggagaacattgctgagggtgaaattacagcagaatttttgagatggtaccaagggtgagcattgccatcctggtgtgcctagggtgagcattaccatcctggcagagcaaacaagcagtcagagcccagatcagccctgtcttcagacacccagcctggcatcttgcagcccaagggactaaggaagggagga

SEQ ID NO: 34697 - DNA, 1199 bp, Mus musculus
gagaagaaagagccatgcttccagggtgaggcagagagacaggcctctaagatttttggcaagtaagtaccagatgatggaacagggtacttaggactgagtggttttgcctcatcactaatgggctggagggtagatgaagctggaagaaggacaaagaccagctactatagtcaggggcctgaccctgttccgtcagattaatctctttctcttccctttgctgtatagccgttctagggaacagcccatctttctgcagcttaaggattatttttgggtaaagacgccatccacctatgagctgccctttgggactaaaggaagtggtaagttatttctcagctccgtgggcaagcatctcactgactatgaactgctctgaaggactaatgtgcttaatgacttgttctacccaagcaagtggacagacagttcaaggtctgatcttgtgggccacgttcttggatgttgctatccactggctccatgtctgggttcttttgcccaggctcaggtacctatgtcaaggagggagaatcttgggagtggaatgggagcagcctttagaatgctgatgaccgtggtcttctctcattctatttcttctgttccttttttttttttttttttcctgtagaagaccttcttctccgggtgctggccatcactagctattctatacctgagagcataaagaggtaaggagatattcttctcattataatctggcaccttcacttcccctgctccagtttgaactcatcatggtctagtgccttgcctttggttcactgtggccagtttgacctgccgtagcctgcctgtctccaggagctattggtactctaaaatcacaacgacttagcctgagcatctagatgccagagtacgcagaagctgctgaaggtattgccatggcaacagacagacctgggcaacaggcaaggaagctgtgtcctaggatttctcctcccctcttctttctggttttttttttttttttttttttttttttttggttccttttaagacagggtttctttatgtagcccaggctggatttggcacttcttcagtgccaagttacaagtgtgtgccaccttgcacagttcttgtgctggggtttcttgtggcactcctctcattatctctttgctatgcgtggcttgcttgtgtttcatattgaggtacaagac

SEQ ID NO: 34698 - DNA, 1099 bp, Mus musculus
ttatttagttcagatttggaaactgaagtaagcctcagatcaggtggccatacctgtgctacctctctggtactagtctcttggcatgggacatcatagtggcaagaatatgtgggtatacgatctaatgaaaagatagaaaagtggagattttggaggtcaggcacagactttttattaaaaaaaaaaatctgttttcataaaagctaacagcaaggggaagggtatagagtgttctacactacactgcactacactgacctctgtgttctaaccacaatcccacaaagaaaaaaaaaaaacactaagtccttccaagaatagcaccatggtggctgtcttagtcggggtttctattcctggacaaacatcatgaccaagaaacaagttggggcagaaagggtttattcagcttacacttccatgttgctgttcatcaccaaaggaagtcaggactggaactcaagcaggtcaggaagcaggagctgatgcagagaccatggagggatattacttactggcttgcttccccctggcttgctcagcttgcttttttataaaacccaagactaccagcccagagatggtcccacccacaatgggccctcccctcttgatcactaattaagaaaataccttacagctggatctcatggaggcacttccccaacttgaaggctcctttctctgtgataactccagcctgtgtcaagttgatacacaaaaccagccggtacacatgacctaacaaccttccaggagtgtgattgtttgaaggagaatggcccccataggctcccataatttttaaagattgatttatttaatgtgagtacactgtcactgacacaccggaagagggcatcacattccattacaggtggctgtgagcaaccatatagttgctgagaatttaactcaggacctctggaagagcagccagtactcttaaccgatgagtcatctctccagcctggctcatatattttaatacttgatcctcagttggtagaactgtttggaaagatttggaggtgtggcatttttggagagtgtgtgtcactgggattgtgctttgaggttttaaaagattttcatc

SEQ ID NO: 34699 - DNA, 1123 bp, Mus musculus
ttggtcactgtctgagtctccccagcactgtgccagggatacatccctttcttcaccatcccttaaaccaggcctcttccccggtgtctctggacatggaatgagcataggcacaaagacccagaccagtggaaagtgatgaagtgggagcctaggactgattgtagcctaggctgcttcactacctaaacagttcagctggcatcccaggcatggtgcccaggactggcctccttcctggtgctgatgcagagaaatctgaccagagccaaggcacagaacattctaggataacctggcccaaatttattgacttgtctattaacctgttctttaatctggccttatgttcttcctacttttcttctcatggtagaagcttttgaagtattgtgccattaaaaaggcagctttgggggctggagagatggttaagagcactgactgctcttccagaggtgctgagttcagttcctagcaaccacatggtggctcacaaccaaccatctgtaatggaatctgataccctcttctactctgtctgaagacagtgacaatgtactcacatacataaaataaataaatcttaaaaaaaaaaaaaaaggcagcctcttgagagtgtttcttagatcctctgtgggaggcatcttgtttgcaagctactatcctgttacaggagcagtggttctagggaaagaaatggttctagttagcttctataaacctccagcttctgactaccacattcagtctatagcaggattcagagtagctttctgactggatcatggagctttggggaaagaaggagccaggatctgaagagccacactgagaagcttggatttcacctcggcagaaacccagcagatttttaaatatggaagcaacatgatcggattttctttttaaaaatctgtctggctagggtgtagcccagtggtagagtgcttgcttagcaagtggatggccctggatgtgatcctcagcaccaacagagaggagctgggggaagtcactggtccccttgaagagaacaaagatagcaaagcaggaagcaggctgtagacaaaggctgtttagtctacttaacagataacagtcttggtgggaaacccgtgga

SEQ ID NO: 34700 - DNA, 1179 bp, Mus musculus
ccatcagtatcatcatggcagggagcatggtggcagcagaaatgatgcaaaagaagtatctgtgaactacatcctgatccacaggcagcaggcagagagaaagatagacagacactgggcctagtatgggcttttaaaacctcaagacctattcacagtgacacacctcctcccacaaggacacacctccaaatccttcccaaacagttcatcagttggggactaagcatgcaaatatgagcctacagggccattctcaatcaaaccaccattttgtgtctttgtgtttatctttgtgtctgtttatccaggaaaacttgttctgcagctgctcaggagacatcagacagacacagggagagtctcctgaggggagaaacatgggaggaagtccagctcactcatagctctctgctttgccccaaatggcccatcagtatatgttgattggaacactagagctagaacccagggtctcatgcatactaggtatataccctgagctaacccttcctgaagggcttaatttttaatttcctccctgcaggtttcatcacttcatctaccccaatgaagaccccaactggggaacatgtagtcttgagaaggatcaacaatgtccatgtaaatcccaagttgtattgtgctttttataaagtggagggcaagaagggagataatctactcagatgtcggtcttctacctgcttacagcactgataaaagttgggcttaaagggaaataaacatgtcaggatccattgtgtgcccttatttccctcacacacagcccaacttccttccttttaccctctggttcctacaggtgaaaatggacaagagcctggagtatcaaccagtagaatgtgctgtagtgatcaatgctgcaggagcctggtctgggaaaattgcagagctggctggtgttgggaagggacttcctggcaccctccagggcaccaagctacctgtggagccaaggaaaaggtagctaccgtcagggcagctaaggatgaaaaagaactgttacaaaagtttaggatgtatttgtgtgtgtacaagtgtggtctgggcagagggttggtgagtgttattcctgcaatgtcataactcacctgatcgtgacaggtatgtgcacttatggcactgcccacagggaccaggtctggagacaccgtt

SEQ ID NO: 34701 - DNA, 1212 bp, Mus musculus
gtgtcctgtctcctgtcccagctttaccccttgtccttacctggtgtctgtctgtctgtctttttttctcacggggtgctagaaatgtcccagaactcccttgttgagggcaggattatatctggttatttcccaaacgtagtccaaagtctggttttgctgtggatgtagcctgactgctgaaacgctctttttccaggaacggggcggtaacaactctttcactcatgaggctctcacactcaagtataaactggacaaccagtttgagctggtgtttgtggtaagtgggggtatgttagaaagacaagttatgttctcaacagcatccccactgatgaacctaattaattgtgggtattgtgtatgtgataaagtgatagaaaaaagttaggaatgtggaggggagaaagcaagcgacttctgggtaagattgtaagcttggctctcccggggcaggaaacctatctctggaggcttgggttgagttggcttccttccattctgggctggcatgtaaggagatctattggctccgtctccttccataaacaggttggctttcagaagatcctcacgctgacctatgtagacaagttgatagatgatgtgcaccgactgttccgggataagtatcgcacagagatccaacaacagagtgctttaagtctattgaatggcacatttgatttccaaaatgacttcctgcggctccttcggtgagaggctttcctccgttcaaagggaaaattttcatgatttaagagtgcctgcctgtcggtggcgcatcaatatttacatgggttcaaaccagtcacattttgtagcttgtttcttatagtccttttgatatgtgggatctttttcttaagtcagagttgtcctcttgtatgggtagaaagaccaactagtctcttttctctttagtgaagcagaggagagcagtaagatccgtgctcccactaccatgaagaaatttgaagattctgaaaaagctaagaaacctgtgaggtccatgattgaaacacggggggaaaagaccaaggaaaaagcaaaaaacaacaaaaaaaggggggccaaaaaggaaggtgtgtttgagtttcctgaccctgctagggcatacaagatgttagcatagtattataaaactctgtggtactctttgacattgctagcctcctttaacttaatgctcaccaccctatcactccc

SEQ ID NO: 34702 - DNA, 1411 bp, Mus musculus
catacatcacaagcaaacccatcgtctttgtgggtactggccagacctactgtgacctacgcagtcttaatgccaaggctgtggtggctgccctcatgaaggcttaatgtggctcttgcctaataccaaatcgccgcttgccccaagtccctattcctatatcaagaatgtgctttagagtatgtgagcaacttgtcttcagtgtagtacaaaggcagagtgaggggagctttggagacttgcagctccttctaacccaatcctttgttcagccctacctccttctgcaaggagggcctaatcatgttacaatcactgcccaatgaccctccctcttcctactcaggcatccccttcactctgcctacagactccatatcatagctttgaccaatggttgaaaaacccaacacctggagtgttgctaactagtgtgatcacagagccatggtgagataaggagcagtttgaggtcccagctctaatggcttaattccagagccagctctggatcttaatggcatctatctagaagaatacagcttctgggtccctggtgtcaggatgacagccacctcactgtggcagtgatggtggcccattcttaattgctgctaattataaatctggtgatgaactctacacccgattgttgccccaaagcatcagttaggccttgttacaaatgagtgaaaggcgagtgcccacttctctcagaaacacggggagcagagttgccttccaacctgtgcctgctcccaaaatctagatggaagctttgcatgtttccttcctgggagaaagggattgttgagaaggattcctgttgtcccgtacccaccccaccctcagcctcctgggcaggtcctggcttttcctcattctcttctacagtgcctggtagacaagtgctacgttgaagaacacaaacctcttgttaagacttgtcctgtagtttggtattacagatgtgctactagtgcaataaggtgaaggctgtctgcccagagaaatacataatttatataagaaaataaatttcataaagaaattgcctcttaggttcatattattttatacaggatataaaataagaatgctaactcatactaactatatagttcttgagcttctttttggcaagggcatgataggaactagtagtgctctaaggaattgggtaagtgcctgtcctgagaaggatcaccaccctatgatgaaaatagaagaatgccagtttttaacagtaactcttcaaagtagagccagagttctggcaagtaaatgaacaagcttttaatacagctcagttatgtaaaatactgtacactgtaaaagatctagaaaactagagcttcaagtcatgttttaaaaaagccataagctcaattgaaaaaccaagtggagtaca

SEQ ID NO: 34703 - DNA, 1234 bp, Mus musculus
ccccgccctcgccaagatggccgcgccctgcttgcgtacgcctggtgtccagcttttgagtatgagttcgcgtcccgggagattgttcactcccggctcctggtcgttttgttccagcgctacttcctctaggcccctgaatgctcagagattggcagagaagctccgagcccagaaacaagagcaaaaggcaaaggaagtgcgggtgagtctagagagactcaacttccgagaagcgatgctctcacggctttcttaggtgtggggtgtggtaggcaggtcctgtaacagcaagtacatcaatgttgagaatattctgtgtggtagtcggaataccgcacttttgctactgccagacccaccgcgtgggtatgcagataagacagatggctatgtatggtcccaaaggaaacatgagtcaaattatacagtacagtcattccacggatttccacctaaatcgcacttaaggccattcccagcgcttcactccttcattaagctttttccacctttctctttccttaggtgcctacaaaccccgttcagcggagagtgcaggaactagtgcgattcacacagcagctgcagcgagttcaccccaatgtgcttgctaaggaactgagccgaaggattctccaccaggacaacgacctcgtggtcattaataaaccctatggtctccctgtccatggtaagagccatgtgggctaaggagagaaacctgctgctgcttcctcttccatctagggtcacccctgaagctttattcatgagacactcttgaattcaagttaattaaaccttattatcccatgtatgtgactactggtaacaaaccagtgtctagtccccacttgcagatacctgacagtgagctgtatgcagcctcccacaggaattattgcagagagatacagaagctcagttctgcactgtgggctgtgtacagccacccacaagaatcgatgcggagaaatacaaaaagttacttgctaactgttattttccatcaaagtggttaaaacaaaacaacaacgaaaaaggagttgggagccagtgtgcgactgccgccccaggtctaggggaggatccggtgttcatgttcagatcagtctcagcagcagcaaaacttcatttcaaaatgagagaggtagagagacaaggctgggaagaggaaataatacacacggttgcggtacacagtaaccccagagggactggaacttaatag

SEQ ID NO: 34704 - DNA, 1126 bp, Mus musculus
tagaattcatgatgataacaaagagtatatgaactagcttagtacttggaatgtcgggtgataagatagtggttatgtgcacacgtgtgtgtgtacttggagaagtcagggttctttttctgtcgctccctattttattgacatagggtgtctcacagaacctgaaactcactgattaactagctagcctccagaatctgctagtctccatccccttgaacaccggggttgcaggcgtgaactgctataccctggctttccatggatgctaggattctaagctcatcagcatgcatgtgcaccaagcactttacccactgagccatctcctcacccccttttgtttgattggtttggtggttggttgtttttgataaaaagccatactttgtaactttggttggcctggagctggctacatagaccaggatggacttgaactcccagagttctgcctcccaaatgctgggtagaaaggctggtaccactctacccagtgctggtttttaaacatttatttgtgtttctgtctgtctgtctgtctgctgcctgcctgcctgcctgcctgtctgtctgtagtacttgggcatgtgcttgtctattcttctccttccattttgtaggttccagggaatcaaactgagtttgtcaggtttagaagcaagcagctttatctgctgagccatctccatagctactgacttgttttttgagacaggtttcatgtagctcagtctggccttgaactttgatcttcctgccttctgagtgctggaggcaccataccttgttctgtagcagtgttttttagagcatattcctttaaaaacagacttgcagctttgaatagtatgcatgttaaaaaatttttttttagtattcctttgaaatgaatttttatttcgtgtgtgtgtgtgtgtgtgggttttggtctgtgtaccacttgcttgccagaagagggcattggatccctggaattggaattacagatggctgttagcggccatatcagtgctgggagtgcattctgtgctttcatcctctgagctatctctctccagttcatgtttaaaattttaatagtatctaaattgctctccaaaaatgttgtgtcagtttcacctct

SEQ ID NO: 34705 - DNA, 2164 bp, Mus musculus
atcactctgtgtcttccagggtcttccgtggcagtaggaacttgtgctgggtcccatcctcaggcctgttcagttgtggggaggagggttgcccaagccacttcacatttgtcaccagtcattcctagatggaaaactgtcacttctcccgtgtcatcagactttctgggaacatttagaaatcaaccatagttgtgatcatttgtttataatagccaacccaactgacagattttttttgactgccttccagaaaaacactaatactgatttattttctctctggcctggctacgaatagtgatcagtcttctaggtttcaaccagccagtgttgttatgaacacggaagcatgtaaagtctgtctggattattgtattatgtagacagggaaccagactcagaaagaaaattaattccttcatggtccactgctttcttaatttacaaaatggttgtcatgagttctttgcactgcttgcaagggtatataatacaaaaatgaggcttttaaagtgatagtttgaagagaaagctgttacacgcctcaagaaagagaagggctgaagggacctctgagtgaagctcttccgttgatcctatagtacttgtgatgctcaactacttggagactgatatttgtgtcacttctaacatagacagtgtcctggaggatctgagtgagcatgtgtgagtcaaccttctgccactatagcaaaattcctgaggtgattgtcttataaggacgcagggttatcttggttcccaagcttagttctagtttgtgattgaatagacctgtagctttgggcctgtgttgagggagcacatcatggtggatatgcatggcagagcaaaatagcttataccacaaaccagaagagggggagaacgagaagaacagagtgtacaagtccccctctcccccaagagcatgcctcagtgatcagaagacctcacacttccctgctcaagattctaccatctcgggaacatgttgtcatgggactcagaccttgaacacagagatggataggcctttggaaaacagtatccaaaccaaagcagaatgccgggaaaggcttagtttgaagaaagggtttgagggcatttttggatagtttttctggtcgctgtcattatgaacagtaactgaggcttcagtcagcaggatccatgcaagcagttactggtctctgagtgacaaggacatcgcggctgcctttggaaggcttttcatacaaacgtgtgaaatagaaaccccaggtgctacaaatgcatttcagtaacttgaaccaggccctgatggatcacagatctgcttttgaatggtgtatcccttgggggggggggggcgcgggggggggggacaacaaaattattctctttatgtggaatcagacaattccaggatacattttgttttcatttcccacaaattgcagtgaaagagaataagatactgtactaatcaactttatatacatttgtcagtattcccttacatatgtctgtatcttttataaatagaactgtttgtggaaatgtactgtttcagcaggggccactacgcaagcgttccttctgaaaaatgcagtaaatagaattccatagctgggtagcgggctgctgtagaagcgagttctatgatcctggggttcatggccatagtataagagatatgcagttagttttggaggtagtttgtagccttacatcttgacttgcaaagtacggtgtagagacctactgtgtgctttgccagttgagttgaaacaaagttgtctcagagtcggggttttggaaagcgggaaacaaatgtctgtgggcagtcagttgttcactgtaactcatgaaacaggtatgctggctcgagccttaggtcagaactgcttttaaagattgaatttgacatggggcttgcccatgaggaagatgaaattcctttacctttagggcaatctcattgtggactgctttatttatgattagtaacgctgttttaagtgttaacccttttattgtattttatttataaaaatggctttatatattgagatatataaatataaatataaatctatataattgcctttatatttaggagtttgagttctccttattgtgagtttctgtgaacttttgtgccctgcacagtcaccag

SEQ ID NO: 34706 - DNA, 1104 bp, Mus musculus
gggggaggggtcaccagtcattccaaaatggaatggtgcgcatttgtggagaaacgattgtttattagccccctgttttctcatctgacctccacaacaaatagagtaggcatggaattcccggccgacaagtgagctagagcctgctctggagcctactctacctgacccatcaccacgccccctttacctgctttctggaagtgttatggttcactctccgtggaaccagtccagaacgtgtgctgttgtccacccctgctgcagctggtggggcttccctctgtccacccgcatctcagactggcagagctctttaccaagtacttcatgttcgggaatctctccttgatactctacccttaccctcacccaatcccaccctttcctaacctcatgaagatttaaccatcaactggcccactgaccatgaagctggtaggggctcttcgtggttcgggagagcctttgttcagcattaagcttccctagtcctagtaaatcatgtctccttttcctggttttgttcaccaattatgtgactggctctggtgacgggtgctgtacagggtacaggttaattgtgtcattctaaactgttgaggtgatctcattgttaaacggttcttgctgggttctctttgtacagttgttactccaggctgatcacgtcacatctctgcgtcagctccagcactaccgagagactgttcggaactgtcctttctttacctgtattgctcgctcttacagcattggccctgcgatgcatgccttgtgctatattgaaaaaatatgttttattttccttaaagttgtgctgttatgtgtgaagttgtacatactctaagtgatgtagttttgacaggttttatttggttggcatgattttatattaaaagagaatgctgctttcacgtgcagtcgcctgtgaagagggatacatacatacacacacatacacacacacacacacacccctggggacacagagtggcttgtgactgagagtatataaatgtcctatttggaaatgttccagaacctctgccttgttgttctacaaaggccctgtgaacacccaagggcccagccacctctccc

SEQ ID NO: 34707 - DNA, 1132 bp, Mus musculus
tgtctacttacagagagtgaccctgcagaagatgggcatagccaaggtagggtgctgtccggtacagctgaagatgctgccatttggaagtccggtggttgtataactccaggtgacattgcccgaggcacttggaccaatcccctggggcccttcccagtgaagttgagcatttggaaaccccccaggccaggtgcatagcagggtcacaaccccaagggtggggagcacggcacaggagggctgcccttcagggggatctgggtagagaggtgggtgagaaggagctgaagcagctttccttgccagtgcccagcaggcctgacccaggtcagggtgtggagaactggggtgacaaaggagaaggaaataggcaagtagtgttggtaaagaaatgctaagccttcaggtccaggaacaaggggttaaaggctaggcaattcaaagctcctgctggatcccacacccttggttttcatctttgcccctgggcagctggcctcactggcattgcagtacccctctctgtgcctcagtccaggtcttgagaccgtggggacaacgactttgggaaaggactgtggaagcctaggagcttctcgtttcccagcctcttcccacggtctcccctagcctttccctagttctcccccacagccaacagtttgacactgttccccaagggggctggagatggcctgagcacctggctcagctccagatttggctgccctccccacccaacactcacagtagatgatgagctggacagtggtctgggtgtgggtatctaggtgcctgttgtgagccaggcaggtgtacaggcccgtgtgggtgcggctggcactggcaatgatgtaggtgggcccagtgtggatctgagagtcatcacggaaccacacatagtgactaggtggattggatgcagccaggcagctaagtgtcacctcctctctctcactggcccagaacccatcttcagagaatcccagtggttccacagtgatcacaggcttgtctggaccatctggaggacaaggaagatccatcacctcgctccacccttgccttttcactcgctcgtgctattgctgctgattctcttcacccattccaggagcacatggcacac

SEQ ID NO: 34708 - DNA, 1154 bp, Mus musculus
ctgctgtgtattcttacccttgtttctccttagcatggctgttgaatttcctctagtcttatatgactgtaaatttgaaaataccaagtggatttatgatcatgaggttcaggaattcaatgttacccacctacaacagctgtgggctaatcatgctgttaaaactcacatgctatatagtatgctgcaaggtctagactctgttatggtaacatgtgcagcaggaacaaagatggatgaagcaacagaatggagaaacattcaaccccctgtcataaagcacacgagtgcctttgtagaaggagtgaaaatgcgcacatataagcccctcatggatcgtcccaagtgccaaggactggaatcccggatccggcattttgtgagtagaggcagaattgagcacccacatttactccataaggaagaaataaaagccagaagggactgtgctgacaaagaagaaaatactgttgtagagaatccaagtaagagggtttgtataatagatgcagaaattaacagcattgcataatcctaggaagcctagcatctctaacaggatccagggagcaataaccagttaaaattctaatgatggcaaaagggcctaacaagttgttaaacagaaaaggatgtattctctaatccctgtccaaaagagtgatgaaatgaaagacgcaaaaagcacttgtcagttatatgcacctggaaatccgtgccttgtgttcaaatccattaaagtctggtctacaagtatatttgttctttttcaaggcaaatgtgataactaataatctcaaagatctttgccaaagtgtcttacttcctaagaattcatcaactaaagatagatagatgcattctgtgccaggcatgaagctacccagcatccacctaactcaaggctgtacaacatgttttaacgaggcagctaagtacagaggcagagaaactttttagtaagggtaggagtaaaaacttttaggttctgaataaaatgatatattgaactcatcttaggaccctttagagttgtgaaaacatttttgtttcttgttgaccaagttctggaaggttcaactttgcagaacttgagacagaagaaagaaaaaagttttgagtctcaaggtgtggaggcaaacacctatactccc

SEQ ID NO: 34709 - DNA, 1195 bp, Mus musculus
agtgacataatatgcagtctcatgtatgtattgaatttagtggcttaatgaaggctatttacatgcagaaagctatctgcattcatcataatatacttgattctttcagccataaataaattgaatataactgtattatttaaaactctagctggaggagtcttagatgagttggcattgctgtttgctggcattggagcagtagctaagttggttggttttgtgtacgaggatggttaagagagtcactgagcacagtttacatggtcagcactgctgttgtgagaaacagtgttaactcacttgtcactttctgtcatgtctagacttgtgttgaggtgtgtcacattctcagcctactttgtgtgataagcaaaaacataatgggaaaagctttttaaataacaggtcttagctttttaaaatttggggtttcaaaaacaacaagagatgctgaaaagatgttaccttttactttggtcagatcattacgtatgctctgacatcttaattttctatacttaaagtctgtattagaaatatctgtataagtatatacataattaaaatgtagctcagaaatatgattcaacagtggagtttttttttctggaaaaaatatagtcctattgtatcagatttattttactttattatggctaatattctaaaaagaatgtttaagctattttaaattcttgtgcctcttcccccaaaggatatttaaaaatatgatcttatattaactttatattctttcttcgtaaattttgccttaaacattgtgccttgttttattagaatctaattctggcttttgtaacaacattttattttaaacagacatttacttttaaaaaatccttataatgcttgtatttgctatatcactgcttatctgtttattgaatttattgaatacacaactccaaacattaaaaaaaaaaattaaaacaaataagacaaaagtgagatatgcttttggtgaccttggggggtataattgcccattttgtttttaaaaaaattttcagagtgagatgagcacattcaacaattccttgtccctttgagttataaggaattccagttttatgtttgataccaaagtccttacaaaatgaaatataattggccagtataggatggtccattatctgtcttaatgactttaggcaatcccatagcattaaag

SEQ ID NO: 34710 - DNA, 1102 bp, Mus musculus
taataacacacttgagtttttattttcccagtgcctatagctaatagatctgtgtcccctctcttcaaagaaaccggttatatatcaacactgttaacaagtgttaacttgtttgtctgtaaaccatatgtcaagttaagaatttgatactttagtttttggtcataatttttaattccatttgatctaaagataggattacatattcaaaatagtttcattcagaaatttgaggatgaattttcttttcagcctaaatttgttgtcaatgggacctgttattcagatgccttttgaaatggccatatgagtgtgtgcatttatgtgtatgtgtgtgcatgtgtgtatgtgtgtctctgtgtgagggtgcacatgtgcttgtatgtgtttacatgttctataactgacaatgttttatgatgtgctggagttcttatgcataccaagctatgcatagtggctcatagctatgatcccagcacgtgggatgctgagccaggagaactgctgcaaatttgagaccaacctgaagctgcatagtgagttctaggttatcctgaacaatggctatgttcagagatacgatggccaaaataattttagttatgatactaaagacttaaaaagtggtaaattattttattgaagttaaatcctgttgctttgcaacttacattaagaccagcagctgctcttgagtcttcaaagttgtggaagagatgtctgaaaggagatggacttgtttaggaagagaggagtgatttttggtcttgaaaaaacatccacatgttggtatgaagactcattttaaggccatgcatatttggttttggaatccagctgtggctctcactagctatgttactttagtcaatttgtaattacatggaataaattattaaataatgttatttctttatttgtataataaaggtgattccatctttcctaacttcccttctctttcctgagataaggaacaactgtacacatgaaaacaccttgaagtaaaggactgtaaggtgttgaacctgttcctctatagctgagtagatgatcctctcaaaatgatttaagggttatgaattgcttaaatgaaaag

SEQ ID NO: 34711 - DNA, 1149 bp, Mus musculus
gagggttagccttcggtgtattgagtagctttgattccctgctagatcctccaaataagctctcacattcattatcttgggggttgagattttggtataaactgtagtgggaaataaacttttaacccattatactttatatcttattcttaactaccttgaaacttataacccagaggtttattttcatgaagtataaccattaaattaaaaaatctcaacacttcctttggggttgttggagattaaacccagggcccaatacctgacaggcaagaattctgtcactaagttgtatctccatctttaatatgatacctttgaaaagagtaagtttctatgaaacttagcatgaaaaccatattgaattactgtggagaaaaattgtattctttttatgttgttcattttccttttatgtgcttatttttcttgacatatttgttacgtaactttatgaacactcaaaaactgtaacttgttttatttttagaattgccgtgggaccagcccagtgatagctgtcaggaatattctgattggaaagaaaaaaaaacctatctcaatccttggaaaaaaattgattctgctcctctgggtaactaactgggttgtttgaaagtattgatcctgtgggtaatagtgtcatggtagttgatttttttcttaactctctcccccccttctccttcttttcttcctcctcctccttcttttctgacttttttcttccttcttcttctctgtagtccttttaactaccttagaaaatgtaagtcaagagggaggaagggaggaaaggagggagggaacaactctataattgtggcatttggaaatacacttttaaaaatatttttaaaaaatctatatatcaaatgtatactgtatgtatattagttataagtatatgcttttgcaaaaggtaaatcctatttcataactctttagttgtgatgctcagcatttttccacatctttaattatgggcctggatcatatttttaaagactgatggtactcattatgtggatatattttactctttcaatttagagatttaggtttctccttaattttacttttatagaagaagtatgataagtgtccatgttacttgatgcttgtgtatcctttatttgattaaag

SEQ ID NO: 34712 - DNA, 1169 bp, Mus musculus
ctgtgcttggagtcatggcagtgccttttgtggaagactgggatttggtgcaaactttgggagaaggtgcctatggagagtaagtttgagtcctcattttaattttttattgcagtgtgtgtctgtctgtctgtctgtctgtctgtcgtgctatggtgcgtgcacctgtggaggtcagaagacaacttgcaggagctggttctgttgaaggtttggagggatcattaggcctgacagcaagaggcttaacctgcctggccattaccatggtcttcctaatttaaatattacctgtttgtttgctttagttttccacctgttgtctgagtacacactttaaaaaaagtcctttatttcaagtggcaaagagcatggatattcgcatttgtacatcaaggctctgagtgagtgaagcacatccacacctgttcctcctcttttgtgatggtagacattgaacctagtgcatcactcatgctgggcttatgctctgccatgagctacatttctaggcctgtaaaacaccaaatttcttcttacatttgtttttgttcagatcaaaatcttgttaaattgcctaggttggccttgaacttgtacactgtagcctcccaggtaggtatgacaagcctgtgcttgacggtccaatttcttttctttcttttttttttttaattttacttttataaaattttcttttataaaagaattgttttcctaacaaatcatgtgtcttagaattttaaatgagataatgaaaagaccctggcggcatcctgcctaatttcagatctccacactcagctgatcctggttgtatttgtgttcttttttttttttttttggttttttgagacagggtttctctgtatagccctggctgtcctggagctcactttgtagaccaggctggcctcgaactcagaaatccgcctgcctctgtctcccgagtgctgggattaaaggcatgtgccaccacgcctggctgtatttgtgttcttgagcaagctttatgtgcctttgtttcttcatctgatgatagaattaatggttcttaccttaaagatgtgttcagtagttggctcaggcatatatgcatgagattaataagtgtaaagtaatgctgttgtattactagatcatgtgtatatgtgatgtattgtagactt

SEQ ID NO: 34713 - DNA, 1197 bp, Mus musculus
tttcattgtttccttattttttgtatccaagtcccttttcttagaattgacatttctctattatgagacttttgtatgcttggcaggcattctaccattatgccataagtctagcctagttaaggaatattgattgtgctccccaacccacctccttttttttttttagataagatcacacacactcacacacccttggctcaggctgaccaacctgaatcactttccctggctcaacctccctagactgaggttatagatgagtcaccattaagtctactttgctgtttgttttttcttgaaagcgagcatcttggttgggtatctcctgctttatctctatagtgtggtgggccaccgtgcttgtttaagaaagctagtacaggcaaatagtcgtgtgtccccccccccccaaaaaaaaaaaaaagatttaactggttctggagcctcctgttcaggcaatattggtgactctcactgcactttcccctcacacatccgcggcgatgtggttttttttccccttcgtttttttttttttttttttggtaagactaaccctgtataactcggattgccttgaactcaagatcttcttgcttacgcttcccaagttctaggtctacaagcatgcaccaccacacttgctttccttcgttttttttttttttttttttcagaattccagcagcagttgctagcttctcaattcgaatactaaggggggcacaattgagtttacagagcactctgtgtcgcttagtttgagccttcctccctggggctccgaggtcaagagcaggtcggtttacgtacttaacggtgcagcctttgcaggctctgagtggcagggaacctgggttcttggcccaactggtggcgcagtctggatggaggcttcggtgcctctgtggagcaacgtaaggcgtggcacacgccccgtgccatttccatttcattcggactcagagatcagttctcaccaaagcagtcgtcaataccaaatctggtcagcttgtgtcttaactacggccacatcagaatttcagccagtattagaaggaagggtccttgcgcggtcggtctactgaagtcgctcctctgcagagcctgggataggacaacgcgcgccggcccgctttacggcagaggtgtgcgcttttgcgacagcatgacgcaagcaggttttggcgggaa

SEQ ID NO: 34714 - DNA, 1226 bp, Mus musculus
tcatactcaatgcatagctgggtatagcattccagactggcgctctttacattataaaggcactggcccactgttctaatgttgagaaatggcagttattttgatgagtatttgtctattctttgccccagatcttttttgcatcttttttgtgggtgttcactgtcctgggtactctggattttcatgtgtgcatagtcaaatttttctgtttttttttttttttttttcaaacagttatatatggattcctccaattctctgataaggctaattaaaacgttcatattttaggcaacatggtatgacacttgaaatatttaaatttttgtgtttgggtgttttaccacatatatgtgtatcatgtgcattcctagtacccatagaatccagaggaagacatcagattcctggcactggagttatcgacagttgtgagttgccatgcaagtgctcggaattgaaccctttgtaagaacagccattggttttaactgttgaattaactccccagtccatgatgaagttatttgagtgtggggctttctgagtcagttttctaatagtttcttagttgctcttctttattctacctttttggagatttcctcagctgtatttgtggtcttgctctgttttcccctccctccctccctccctctctttttcctcccttcctcttccctccctctccccttttgtatgttgtgcgtaggtttaagcccagggccctgtgcatgctaggtaagcactcttaacagtgagcaacatctcttaatttcaaccatatttaaaaaaaataacttttttcttttctgctttcatatttctaaagtcttaagcactcttgtttagagatctcttttgtcccattgttttgctgcctttccaattaaagacttttccaaattcttggctgactgcttttttcagactgggtggtctaaagtgttatggagaatgtgtgcatatgctttttaatgtactatgatcaggctgggctggcacactgagaagttgttgatattggtgttagatttcctttttcttccataatatgtgttaactttccttctttcttttgtacataagattcaggatttctgtccttttattcaaggatattggccaggctgttgcctttctaggttaaagtagaaaaggaaagcatattggttcaactctcagtacatacacttaaatttaaatgctattttcaggatagc

SEQ ID NO: 34715 - DNA, 3255 bp, Mus musculus
tcttcagacacaccagaagaaggcatcagatcccattacagatggttgtgagccaccatgtggttgctaggaattggaactcaggacctctggaagggcagtcagtgctcttaagccccaaactatgagtcatctcttcagccccaaactatgttttctttttgctgaatttatgatacataattatatgatgtcatgtaagagtgtgttacatctcttatatgagaaatgattgaaccacatatctagagaagcagaggcaggggaattgagtatgaggtcagcctaggctacatagtaaagccctatctcaaataataggaaaaaaaaaaaaaaccgaatgattgaagtcttttggtcaatgtcaaagttagtctatactggttcttagaggtactctaaaaggctagattgacagtaggtaggctttatctcatgctaatttattcacatgccaaacatgtgtaatcctttctgcttacagtggaacttgtagatctttccaagttgacctttcggtaaatactgaagttatgtctttatgttgcaggtaaaggacctggataatcgaggcttgtcaaggacataaacgtcacattgtgccctgagcattatgcttcgcactgagcgcgtcatgttgaggacgctgaagatgttttttatatgcagtttataagaacagccggatggggttagaattgtctgcaagttttgccctggacaatatgggctgggccaagtgaaatgatttttataattctgagcaggttaccaaatgaaatgttatggctttactttggtcaattaaaaggggggggggattttttttaaatgtgccttatttgttttgacttaaattggctgatacgaggatcacagaagtgagcggatggaagaccatatccatgctctaggtccccaaatgaaccagataggagcatttttttctcctatcagcaatctcaaggactagctctggttcaacaaatgtaaacaacaactttgtcacacttttttgttttttagcacccaggtacaatgctttccttataatgggtgcttaataaatttttatcaaatgaataaatgtttctgggaccagaggagtgctgtttctgggcaagaaagacagctttcttgctgttatgtctatgttctcgatgtctatttctttagaagctctttggctttataaggacagaaagttgctgagtattcctgatctcaccagtatcctttcaaactaatggcagttattctttttctaagtagaaatgtgaagcaaaagtgactaatccagtagttcttaagatcagtgaaacatcaatcctagaggaagacactcctccaacatcaggttgatgatcagtagatgtttctggaatcagatgtcattatgtggacctacatgaagtttaggcattcaatacttcactaaacctaaaacatagtaaatggctctttgctcattttctctagactgcactaaatctcttagggttatccaccgtgagcttctgtttttcttaatgtcagtctgctgtgttcatataccactttgaggcttgattacttggttttgaatcccttgctaaatatatacataggaagtgggaagtattgctactagcaggtactttgatatcattgccagtctgactgcaagaaaagagacttcaaaaactacaaagcacagagatcccatagatattttgtgtcaggataaatagctttctgttctgtataataggatatttcatgtaatttacaacatagggcataatcactgatgtatataaaccatcttaaattaattatagtgtttctatttaagaaaacaggaggaattatatgacttttagatagtcacagtggtactcaatgcatatgtgcttaggtgtacttgtatacctaagggcttttccttcaaaccggtgtatgtactgtgtattttaactgtgggtgaaattttagatttaacagatgatttgatatcctatatgtaaatacattatttgatttatatacagaactactgcctagtgggaaaggttaacctgagacttatcaatatgattaacattacaggttattagtaagctttctctatagtataaatgggatacccccttttcatatcattttgactcctgggatcttgatattttctagtctacaaagatttttaagttgatttcattttcagttgtagtcttcttagtgtaaaaaaaaaataaatccacctcaaaagcaacaataaaatttcacacacatgcccacccacacacccagccagcactcgccagagactcttgcttccaggtctggtgaacctcgcactgtgcctcctgcctgatcattagtaacttgctttgttatgttttggtgttttagtttgaggtaacattgatttcttttttctttctttcttttttttttttttttttttaaccagtggctttcaacattgtgcgtcatgttctctttggcaaaccattatctcccaaagtatttacattgcaattcataacagcaaaatcttagctatgaggtcacagtgaaaatacttttatggctgggatgtcaccacaagatgatgagctgtattaaagagtagcagccttaggaaggttgagaaccactgccctatgttttgtgacaccatttttactatcatctgttactgttctaattactttttttttttttttaaagactgttccatgtagctcaggccagctttgaactcaagatacagatgatgctagctttgaactcttgatcttcctgcctctacctcccagttgtgggctactacagctagttaggtactatttttcctatatattttaaaggaaatactttaattttttggtacttgttatctttcctgcttccttaccaccccagctagttctccctcatttgtgcccattttctcatactgtgatcaaacctattcgttaaacaactttgggtgttttgagacagtatcttttatagctagggctggctttgaattcctgattctcctctctctatttgccaaatgctggtattaagatgtatgccaccatacttagttacattgggtttttcagaatgtctttgatttttcagcttgaaataactcttcaggtttgttgaattatattattttactgttgtatttgttgatctttgccattttcattgatttgccatgtcttagtatcttcttatatgtaggggaaatacatttctggagctcttctc

SEQ ID NO: 34716 - DNA, 2287 bp, Mus musculus
taggtttaaaggtgtgcaccactgtacttggcttccagtttaactttttattgaatgcttatgaaggcttagaataaaatattatagtacagatgcatttatataaaagcttgaagctatgtagcctaggcttgtcttgaatgcagaaaactcttctcttagctttccagtgctgggattatagacagtcaccactgtgcctagtttccaccttgtattatattcttacagcacttctaaattggtaagaatcatacttcaagtgcttatttaagtaaatgtggctactggctacttcttgcagtaccttagccctatgtaatttgtaggaatactttcagtgtggcttaagactggaccagtaatagcatacaatttcatcaattaacaatttctaataaaagttttatatttttaggaagtgttttgctagcacactatcctgtctttacagttgaatgatagcattccttattaggaaaatacgatggaaatttctttagaaatagtgatattttcagtgagttcctgagaaccggcagcctttctcatgcagcagtgcattcatttttttctctagatatcaacaagtttctttggatggtccggattggaggaagcacagagacaggaagacacattaaggagaatgactactatactcctactggggaattccgtgttgatcgtgagggttctccggtgctgctcaactgccttatgtacaaaatgtgttactaccgctttgggcaggtctacacagaagccagtgagtgtgattcataatgctaacagcaatagtaatagctgacacatactgtgttttccatgctctgtgcttagtattttaactcatttagtcctcacagcaacccagaagataatttaaactaatgttaatgtcatttttatatttgaagaagttgagcccacaggttactgaactcttgctaataattatgtgataattaggattcaaactcagtctgcctttaagttctgtgctttaaaacattatcttttattttgtgtatatcaacaaagaatatctcagtgtgagaaagaataaaagaaaagagtgctttttcactatttagataagtacattgagaaggatttggtcaggttaaatcctgtctttcagatttttttcttttttctttttttttttttctttttggtttttttcgagacagggtttctctgtatagccctggctggatgtcctgggactcactttgtagaccaggcctcgaactcagaaatccacctgcctctgcctcccaagggctgggattaaaggcatgcaccaccaccgcccagctagttttgtttcttcatcagggaaaacttttgcagtatatacaagtcgtggacttgtggtccatggaagggttactagtgctagatctttggataacagtcctcaggagtagagtgccttaaaagtcatcttgtagatttagaagacagacgctacatggaccctgccaagcatcacattggacaggactcaagtagggtagctcttgatttgccctttctatctgatgctcttccttacagactctagtcaaagtgcaggctgggaaatagtgcagtcaaagtgcagtcagtgcagtagatgatatgcagctccatctctttaggaatcaacttgtataatagatgttttctctcgttgcttttagagcgtccaccaggctttgaccgtgttcgaaatgctgagattggtaataaagactttgagcttgatgtcctggaggaagcgtataccacagaacactggctagtcaggatatacaaggtgaggagatgctgcaggtctcagaagttgctcttgtacttatagatttgtttgttctagtaatcagtttcccaaatagggacatttttaataaatggcacctggtttcaaagtagcttgtaagtcacttgaagtgttagttatttatttgagtgtgtgtgtgttttcaactttgtggagttgattctctttagttttgtatcggttcatcagacctgtatggcactttatctgctaaaccatctgaccagaccaaaatactactaattatattttttgattattcttagagaggagacatcccagttggtgattgttatggcaacatttctttttctttaaaaaaacattttttactacatttttatatgggtgggggagaggcatctttatatggggaggtgggtacgccatgtattgaggtcagagtacagcttgtaccgatcaattctttcattgtgatggatcctggagatcaaa

SEQ ID NO: 34717 - DNA, 1190 bp, Mus musculus
attctttctggcattggtgtttcccaggtgctgtccacatatatgaaaaatctggacataagtcgcccagacaagaagagcaagaagcaacaggattctacttaccctattaagaatgaggtgaggggctggagtgattgctcagtgcttaaaggcactgactgctcttctagaggtcctgagttcgattcctggcaaccacctgtggctcacaaccatctataatgggatctgatgccttcttctggtgtgtctgaggacagctacagtgtactcatataaaaaaaaatcttataaaacaaaagaatgaagtgaggtttaagtaacatgttgccttggaaaaaatgtgtgtgcatgcatgcatgtgtgcgtgtgtgtgaatgtgtgttatttgcttatgttcaagatcaatgtcttgagtggttagaattaatttatgcagcctaacatattttgttctcacataagaagccgtgtgtgttggcttactgtacagttcttctttctataggtggcgagtgggatgatactggtcatggctttctttctcatcacctacacgtttcattcgacttgggtgaccagtgaagcctattcttctccctccattgttctgtctgctcgtggtggggatggcagtaggatcatttttgatgacttccgagaagcgtattattggctccgtcacaatactccagaggtaaaaatttgggaggagttgggtacttggatagtggtgaagacacttgaaattgtagtaaatctcacaacttttacatggatgggaagcttagaaaaactaaatattcagaaacttcggtttttttttttttttgagacagggtttctctgcatagccctggctgtcctggaactcactctgtagaccaggctggcctctaactcagaaatcctcctgcctctgcctcccgagtgctgggattaaaggcatgtaccaccactgcctggctagaaacttagtttttaatacgttttaaagaccaagtgtcttctagagtagtggttcatgggtcatagcctctttggtaaacctgcgtttctgaaaatatttacattacgtttcataacagcaaagttacagctatgaagtagccatgaaaataattttatggttgggggtcacaacaacataaggagctgtattaaacggttatagcattaggaaggtt

SEQ ID NO: 34718 - DNA, 1167 bp, Mus musculus
gctgggattaaaggctttggatcagatttttttcatgtattcacatgtgtaaagatgtggaaaaggacaaaggtcttataacttcttgtagcagcatttttttaaaagatttatttattatttatttttatatgtaagtacactgtaactatcttcagacacaccaggagagggcgtcagatgtcattaagccaccatgtggttgctgggatttgaactcaggacatttaggacagctgtcagtgctcttaaccctgagccatctctccagcccgtagcagcatcataatatatttcatacttaatatatggtataattaaccatctcttctgctaggcataagattatttgtgttcatttggtttgtaaaaatattatagtaaacatctttgcatattttttctgacagattcctagaattacttactgaggtaaatgtgtgaagtcatcctgccataatgaagatattttcccttgtagatgtctgtttacagggctcagctacttacttttctttccctcttttgtagttggcctctattactgctttagcaacctgtctgatgctcggatttttatcatcatgtatggtgtgaccagcatgtacttttcagctgtaatggtgaggaattcactcagttttagcaaaactttatccctgacttgggggtcttttcttttccttttgtctggctgaactagaaaaaaaaatattgaagattatgcaaagctccttacagttgttaacccttttttggaatgcaaagagactcatattctgtttgtggcgactaattttcttgggctcataatcttgtgttaggtacttcattgaatttggagcagattaaagaaagacatttgcatggaactgctgttacaggcagtagtgagccacctgatgtggatgctgcacaccagactcaggctgttccccagaagagtgggaagagtaagcactaagcctctggggtggactttagtatcttaaagccttgagtatattttctcctgctttgttgttaaggcagagaagattttatgtaacgttatgatatatcttatctacttcagaatagttttttatttttatgtgtattaattagtgttttgtcttagtgtgtgtctgtgtactgtgtgcatatttggcaccttttgaggtcaga

SEQ ID NO: 34719 - DNA, 1068 bp, Mus musculus
tagcctaattattgcactgacaaaaatactccgaatttaaaaagaaaaggagtgaaattctgtaagtataatttactgtagtaaagcagaacagccctttcccgcctcagaattttactgaaatgtaatgctgtgggctggtgacatggctcagtggatagaagtgctttttgtacaatcctgcactcctgggatgaaatgagtagctaaaatagttcagccacccagaagcttggaggtaaactagtctggaatataaagcgtggcagaaacaatcagggaactcctgcttcagacatggcggatggcgagaactggttcccacaagtgtcttcttacttcaacacttctgcacacactcagacacattacacaggcacactaataataaacatgagatggaatgttagtaattagcattttagcttagtgttttagggatatatgttaaatattgtctttttttttctttcaggaaaaatttctccctggacagggcgtttctactctctgctggatccctcttatgctaagaataacattcccattattgcatctgtttctgagcaccagcccacaacctggtcttcctactattttgatctacagctccttgtcttcatgtttccaggtctgtcttgcattttgaagtgaccataagaattagtctttgaatccaaatatattaactattctcttcattttttatatatttttacataattttattacaatactacaatatattttgtatttgtattataaaaatattacaatattataaaatactacaataattttattatatatttacaaatgtttttatttacatgtatggatatgtgcacatgtgtacagttctctgcagaaatcagaagagggtattggatgccctgcaggttaggggcagctgtgagccatcccatgtgggtacttattatacctaatactcagtaacatatttttcacccaactcagttttcttcttggcttgttgaagttctatgttgagtttttgtagttaaagcaatttgttattataaaaacagtgagataagttaaaaaaca

SEQ ID NO: 34720 - DNA, 1236 bp, Mus musculus
gagccatctctccagccccatattttcaattttaaaattttcttttttcacctagttctctttgatatggggtcttatgtatccttggttgttctctcctctgctgaggatgacctgatcctcctgcctctacttcttgagagctgggattgcagatgtgtaccataatctatgcttggcaagctctctactaacctagctacatcttagccctctgttttttttttttttagtctgctaataaaaattttcaaattctgtattactgtacttcctatgggtatatgttggttttctcatatttttgttatattttccttaaaatttctctttcctaatacatattttgtataattttacatctgtctcttgactttctttatatctctgcttctccttagattttgtgtgtgacataattagtttcgcctatatttacactgtagcttggtatatacagttgaacatgttgtgagtggtgctcaaagggactgttctatcctcacaggtctcttcatggggaggctatgtgttcctgatcaacttgattcctctacatgtcctggtgctaatgctgacaggccgtttttctcaccggatctacgtagcctactgtactgtttactgcctgggcaccattctttctatgcagatttcctttgttggtttccaggtaaacctgagactttgtagaattttctgcagccaaatgtttctgagtagcttcttagaatggcttctcttaaaaacatgaattacagtttgtatttgaggctgtttttaactgaaacagcagaatcattggttattagaatctgcttctaatagcatgtcagtatttgctgtatgctctttgaatttagtggctctttggcttgagattgtgtgaggaggaggaggaggaggaggaggaggaggagagcctgtttagttaaacaaggttgactttaataatcaaagtttaaatttcaaaaaaaggttaaaattccagcccttttagtggaaaagatcccatttagtagcagtgagctctgatcatcttaatggggccagtgtgagctcttgaaacagtaaagcttcgaggctagcctgatctacagactgagttccaggacagccagggctatgcagagaaaccctgtctcggataaaagaaaaagaagaagtaaagcacaaaccttttacccaagttccaacatacagttaacaggacactgtgtgtgtttggtttcttgt

SEQ ID NO: 34721 - DNA, 1235 bp, Mus musculus
ggttttgacagcttatgtaattgttggtattattttgaggcagggatgtagtccaagctaatcttttgtagccaaggatgactttgaatgtctagtctttacataatcttaccaactctcaaattctgggattataggcatatgccactttgcttggtttatgtggttccagggatcaaagcagggcttcatatatgctaggcacatagacacactactagctgagctacatccctaattaccttccttttgtattttctgttttttgttagttttagaaagaatcatgctcttacttaggtttatcttttctttgcctatttctgctgagattacaggcctgttcgactataacagcagctcatatgatgtattagtctcagtgtgtttgtactcagtgttaggtttgatgtttttattcagaattgactttgaaggttttggctttgttgtgtgtgtgcatttctagcatctcttaacaaccttgggaataattgaatgctctcaatgtgctcctgattagacagagtagacttgtaggtcctcagttatcttagaggcatgtcagtgttgacttctactcttccaggatgcaggagctgggcttcttgctgctgccatgattgctgtagttcctgggtatatttctcgatctgtagctggctcctatgataatgaaggtaagatttagaatgctgaaggagatgtgtttactttattatctactgaagttttacaaggtgctgaatttaggtacatttctattgcttagcaataataaaactggaattggcgagcagattagaattgggcgggaagggatcttaggtaggtactctcctatcatctggtctagagaggtagctgggaactttaaaaacttaatatttattgcttatgtacctgcatgcaagtatatccatgcttttatgtacaggtcagaggatatttcgcagctttcagttcttttctatcatgcagttttcaaggattgactttaagtcattagatttggtatcaagtgcctttacagactgagcaatcctgtcagctctagctgggaacctcttttatttatttatttatttatttatttatttatttatttttaaagattttaaaattttatttatatgagtacactatagcagtccttagacacaccagaagagggcatcagatcgtgttacagatggttgtgagccaccatgtggttgctgggaattgaacttatg

SEQ ID NO: 34722 - DNA, 1161 bp, Mus musculus
atatttgaaataacatgaatggactttgttagaagtttaaacactcattaggaagttcttgttattatgtggttaactttttcttcgttgttcatttggtgttataccaatatctttataggtatttattacttagaggtttctatgtgtccttgtgtgctagaggaagaaaacgtatgctagtcagatctactagttcatgcctcagaagtcttgtgttttgggtgattgaattcttttgctggctttgttatctaccacaggctagcctcttgaagtgtcctgtctgagtgctttgttatggacattagatttccagttcatttccttcagagaaaagcagtgctgtaattgatacaagtgtgagatagaagtagagacttaagttaatataaatgattttgatggcttaatttttggtagtaaacttttttcaagtaatgcagtatccctcagtgtcataatctgaaaaacaaactcattgcaaagtaagacatttgagagcagagatcccggggacatggttcttttctttcttgctctaggtactttaattatcggactacccggtttctggctgaggaggggttttataaattccataactggtttgatgaccgggcttggtaccctttgggccgaatcattggaggaacaatttacccaggtgagggggacaggatttgttgtgtttgtaaggatggtgtggtgtttgtatgctgtgaaacagctctttctgtttgcttcaggaaacttgtaatttcattctgattatagatttccaaaagttgatcttatgaaggaaatgtgtgagatagtagagatggggggaggggaggatttcttacgcattctggatctctgaatccttaatagagaagtgtagacacttagtaaagttgctatgatagtatttctaatggttggtcaagacttggattgatgctttcttgttattttcttaccaggacaacctaatgggattactttttcctgtttcaggtttaatgatcacttctgctgcaatctaccatgtactccatttcttccatatcaccattgacattcggaatgtctgtgttttcctggccccgcttttctcctctttcaccaccatcgttacgtaccaccttaccaaagagctcaaggtaaaggatatga

SEQ ID NO: 34723 - DNA, 1145 bp, Mus musculus
taaaaatgggcaaaatcacatgaaagatggccaaattcagtattaggtaaatatgatctgataggctttgtgtaatacaacagttaaaagtatcccatttaagtgaaaacatgtagacacttttgtcagacttgtagtgtctcttctaggtggtgagaagtggatgaagatttcattcaagaactattttgcgtcttctgactccagtgctaaagaattgtagcttccccataatgctgctgtttaccttctcttgttctgtaatagcatgccactaattacaatattcattctctggattttgtagctttttctactcgtctttttgctgtgctgagatttgaaagtgtcatccatgagtttgatccgtgagtacctttgctctgacattatttccttctagagatgttgaagtttgtgcgttttttatgtgtttatgttccaaatagttcttcagtggtggagatttttttcagcacatttaaaggaagactttgtcaaggtttccaagtgagtcttaagatctcaaaaatgtaatagactttgttgttaagccttgaggtctggctaggctaagagaaatctggctttttattttgaccaagtgcagtagtgcaccttaagggaaagagtcctggagtacatttaaatctagaaaggatattacaagtcatgaacttgagatcataacttcttttccatttatttatatagtagaaattgggcttattattaaattctatggcattaaaaatattaaagctatgagagcatggtattgtgacaaatgcctatcatcctggactgtatagtgagagtctctctcaaaaaattaaaaaaaagccaatacaaattaaaatttaaaaaatttgggcttagtggcacatgtttttaatcctagcacttgggaggagaggcaggcagatctctgagatcaagaccaggttggtttacatagtgagttccaggccagctaagccttcaaggcagtaccgtgaaatcctgtctcaaaagaatgaaatgaaacaaaaaccagtgtgggctggagatggttaagagtacacactgcttttgcagagggtccacatttagtttccagcacccgggtaagatggctcactaccacgaggcctctgacatcttga

SEQ ID NO: 34724 - DNA, 1682 bp, Mus musculus
tcttttgaattctgctgcctatgtagttttaaatttcaaacagtcagataagctgtaataggcttaaagcggttattttgatcaactggaagctaacgagtgatttctttcagtcttttccagttgcgcctattctccttggtggtctttttaagcaacagacttttccacaagaccgtctacctgcagtcagccctgagcagctcgtcctctgcagagaaattcccttcgccacatccttctcctgccaaactgaaagctgctgcaggccactgagccctgctgtcaaaggggtgggtgggactgggtggaggatgtggcagctcttttctctgttttcctccccctgccgtggaaggcagaacccactgccaagggccctctgcatagtcccttgtctttgaattggaatcttcctgactccagtatatggatttttaccaccaccctaggtctgtaaggaccagagttttccagctgtttttttagcacttgccagctcctgtgcctggactgattgatttgagtacttttttccccctttccttgtgtcatttaccctcccacttcctcctgccttccagcacccctggatgaatgggctttgtaattttaactgttgtattttgtgaatttgttgttactgtttttctgtgaagcacatacattgtatgtgggaggtaaaggggcattccagttgctccagtcactccctctatagccatcactgtcttgttttctgtaactcaggttaggttttggtctctattgctctgctgcagaaaaggaaagaaaggagtgggggaaatggagcctgaagagttggggcagatagacctcagccaaactggctgggttttgaggagtcatgttctttcttccccttgaaggggaaagagttttttccactggtccatttaaagtttcccagctatggggtggtaccagttctggacaagtgccactgcatcatagtatgctcggagaatctgaaccttactctgaagatgaaatttactgttggccactgccaggtcagactggtgttttaaggaatactgggtgcttcatataggaactgaaggggtaaacttactaaaccattcaacctgtgattggtgatgttttcctgtcattttaagagtcgacacatgggtgggggggcagatgtaaaaaaacttgtacaattttaaaatatcacaattaaacgtgagctggtttcccaaaatatgtataatgtttgatttctaaatcacatccttgagatatatatatatatatatatatatatattttttttttttttcatagattgaatgactttgtcttgaataatctgcttataggtttcagaaattagggttgaaagatgttctcaggctgagcttgggtcatagtgttataactgtatttacctttttttttgtggttttgttcattgttcaagtgtgttcatttctactgacatatattaggaagaaaatcctagatttcaatgtattaaagccactctgtagttaaggaagaagttaaatatttgattattatatagaaacctgtaataacaatagctaagccaggcagtggtgatgcacacctttaattccagcacttgggaggcagaggcaggcagatttctgagtttgaggccagcctggtctacaatgtgagttccaggacag

SEQ ID NO: 34725 - DNA, 1214 bp, Mus musculus
ctaggcactctacacatgtgacacacacacatatacccacacatatgcatgggccacacatatgcatgtgctcgaacacacacacacacacacacacccctcagaaaaataattaaaatctaaaattaaccttatcacaggattttttttaaagtacaaaagctaggaatggcggtgcacacctttaatcccatcacttgtgaggtaaagacaagtagatctctgagtttgagggtggtctgatctacataacaagttctaggacaaccagggctatatagtgaggctttatctaaaaaaccagggaccgagtgattcccagggcccagcaaaaggggaccgagtttccagagccctgaagacaaggggtaacacaccaaaatatagactcatttttcattccaccttcattggccgagcagctgcaaagaacaaaggccgtatctcccgatacctagcaaacaaatgcagtattgcctcgagaattgattgcttctctgaggtccccacaagtgtatttggggaaaaactccgagaacaagttgaggaacggctgtctttctatgagactggagagatcccacggaagaacctggatgtcatgaaggaagctgtggttcaggcagaggaagcggctgctgaaatcaccagaaagctggaaaaacaggagaagaagcacttgaagaaggaaaagaagcgactggctgcactggccctggcctcgtcagaaaacagcagtaccccagaggagtgtgaggaggtacatgaaaaatctaagaagaagaagttaaaaccccaggagaccctacaggaaaatggaatggaagacccacctgtctctctacctaaaaccaagaaaaagaaagctcccaaggaggagttggccagtgaccttgaagagatggccactagcagtgcaaagagaaagaagtcctcacctaaggaggaagtggccagtgaaccagaagaggcagcaagcccaccacccctaaaaagaaaaggaaattttctgaggagcctgaagttgctgctaacttcacaaagagcagcacaaagaaaaagaaaaagtcccagaaaacacaggaggattagaacggacctgcttggtggaaggacataccttgtggtggcagctcctgcccatgataaaaccccaataaaaaaacacaaaaccggggctggtgagatggctcggtgggtaagagcacccgact

SEQ ID NO: 34726 - DNA, 1530 bp, Mus musculus
caaatttgaggcctcaattggaagagcaacatgggccacccctgctgggtacccaacttatgagcaagagaatggaagcttccatcacagggagaggcaaagcctcctgatctaactggtctagccccaagctacattgccactaaggaagggtacagaaaactctatgggaaggggctgctgagcaccaagcatgggaacatggcagacttcaaggcctgagctctgggaactgcaatcagaaggaatgggctgaaagcagaaaggaaggacaggttcagactcttgcttgtttggattccaaggcctggaaaaggtgcatctctccttcccatgttaaattataaacctctgtaattatcctgtacctatgagggatttcaccttgtttcaaaggtgctgggcctctctctctctctgtttctgtctctgtgtctgtctctgtctatgaactattctttctgtatttctccaagtaggaccctgttgatctatcctccactcgatcctgttgataactcagccactttgaagcattagtgctgcctttgcagagtcaaggcttggatggggtacgggagctgtcataagtactaaatgtaggggaacttgctctcgggctcttgaccgtgtccaccctcagagcccagtaccttccttgcctcactcttaagatgcctcagtggatgaagacatcagggtcagtttggtgaagactaaggtgttgtatacaactgcaaatgccagtgtgaattaagcactgggtgctcaagtcatgacagctgtcctttaagaacaaacaggaagtggctatgggaagaacttaaccctgaacataggtgccaagtttagcaagaaatgaagataccactggaaacatctgcgtaactgctactgagcagttgctaggagacaccttgcagccaccctctgcctggtgttctgatgccccttccttccgctcttgagtcctggttcacgacatgccaggctgactcctggcatttccgcctgacctctaagctgcccatcagcaccaatacagatttcctttgccaactgtgccactgcttatccttggtagggcctggcatagcagcagccatggggctcgtgaggggcagtaaagcattgtcacatgaacaacaaagattggtgttctggggctgcgacagctgtctttcccagagggcattgctcatgacattgataacactgtgcaatccagcaggagcctagacccccatacaagatacatccattgcatttactaggatgttgtgtcagtcagtgtgttagctagatacactggcctcagcaataaaatataaagctcacttgcctggttctcactttagtcctgcaggaagcagtcagtcaggcacatcttatcctcaggacctggtacagggcaggggctggcacatggtagtctgctcagtgttcacaaatccctcaagaccagaaagactgaccttatgtggaaaggacagactttaaggcaaagctgtgttacttctgtaggccact

SEQ ID NO: 34727 - DNA, 1208 bp, Mus musculus
gagctacagctcagttctgcttgcacacttaagtgagactaacggctatactctgcaaagttcaagacatacagggataggaatctttttaccacactgcactctagggttatttacgttttagatcctcatcagtggaggcgaggtggttctagagggtgtgtctggtagcacacggaaagacacctgacttctgtggctgatggaggaccctcaatagatgttctcttctattttcctagagtgtggtgactttagatgctcccccacccccaagaaccaaagtatagttctgctgaaaaaatgttatactgaactctggggctcacagagaaaatgaaagcatcatctcacctcagaattaatggtagagctgaagagttgcggtgcccacagcagtcattgatcgtatttttactttgttttatttgtttatttggttttgttgccctaggtgtggaagccaagatcctgggtaaaccaagcaagtgctctgctgctgagcactgttggcagttttagaggtagcactgagcgccaaagggcaatggttcacacacacacacacacacacacacactgggcctctcagtggccagatgaactgactgtgaagagagctgcctcctgtgaggacatctggatagagggagagctagaaactgcttggcatgtaagaagcatgcagtaactaaaggtgactctctgtaggtaccaaagatcattatagacagattttaaaccagtgcacattttctgagctaaacaaaacataagctgaggtggggacaacagggtaaggacttacagtgtgaaagaaagttagaaatgaactctgtcacacattactttcacacggccctaaggagagcatcgaaatagatgtgaagatagcagacagtcttggactcttcacctgtgaagtacggataacaggatacctactcctctgattgctgaggtttaaacgggaaagtgtctggatgggtgccaggcctgcgttaagtcccgaagacttaacaagaagcagctttactgctaaatgccattctataaacttttcatactaatatataccatggattactaatctgtctttttttaaaagacaaatgaaccgttagttcccccatgagacgcactgataaaatgagagacagaaaagcatgtagcttgtacagcatcgtgttgctgacaaatgactgagc

SEQ ID NO: 34728 - DNA, 1151 bp, Mus musculus
cctaagatactttgtattgacttttatttctataggcctcacacagttttttgtttgtttgtttgtttgtttgttctaagtctggttttctgaaacaggtgatttgacttttgtgagctcaagttagtaaaatgatgataaaatgaccattgaatatcattacaaaactttaagtcgtttagtttcagtctatatatagaagtttcaagattgatgtcttagggttgtattgctgtgaagagacaccatgagtacagcaactcttatacaggaaaacatttaattgaggctagcattcagttttagaagtttagtccattatcatcttggtgggaggcatggcaacaggcaaacatgatattgagaaggagttgagagttctacatctcgatcaacaggcagcagcaggaagagtgacactggacctgacttaagcatttgaaacctcaaaccccaccccactgacatttactccaacaagaacacaccttctggtagtgccactccctggtaaccagcattcaaatctatgagcctatggagaccattcttccacaaacccccatagaggtgaatgttcttgaactgcagtctggtcatatgttaacagtggcctgtggtgccatctgtgacttatagaagtctcagagtaatagcattgatcaagaagaagcaagccacctgtcacacatgatggtagtgtggtgaattctgtttgaagtgataaatgtgctttggaaggaaatctggaatccaagtttcttgttttgttcctaaatttgcaagactgttgtcctggctagttttatgtcaacttgacacaagttagactcaccagagaggagggagcctcaatcgacaaaatgtctccataagatctggctataggaaaacctggagggcattttattcactggtgattgatgtgggagggctcagcccattgtggatggtgccactcctgagctggtggtcctgggttctataaaagagcaagctgagcaagccagggggagcaagccagtaagcagcaccctccatgacctctgcatcagctccccctccaggttcttcccctgcttgagttcctgccctgacttcctttgatgataaactgtggtgtggaactgtaagcagaataaaccctttcc

SEQ ID NO: 34729 - DNA, 1165 bp, Mus musculus
atttttgtagtgagtgtgttagaagtattcctagccttgctatatataattcctctaactagtgtggaaatgtttgccctttacccaatgccttacttatcctaaaataaaaagatacataggtttctttttttttcctaagtgaacattctttgaagatttgagagagatcactagaataaggagtaaatataaaactatttgatggccacatatcagttatttcttagaataattgaaacaaactggttctttaatacacatgtgcattctacattaacttaatgtgacagttagctttcattgtcaacttgacacaatctagaatcacccagggagagagtttcagtgagagaatatctgtattgggttggcctgtgcacatgtctgtggaggatgtttcaattaagttcattgatgtggaaaggcacagcccactgagggtagcaccattccctaggcaaggggttctgaactgtaacaagaaaggagaagtcagattgattacaagcaaggaatcacgtgagcatgtatgcatttatttctttctgttcctggctataatgtgagtagctctttgaatttcctgccttggttttcctacaatgatggactatagcctggagttgtaagatgaaataaaccactattcccacctctacctcaatccctgagttgcctttgtcagggtatttttatcacagcaacaaaagaaatgatatttaggatattttagaaggctttttggatgaaaaggaaatctgagaaaaggctagtgttagtttaaagtgaggtaggaatagaaaagattcatgtaaataaggaaataagagttttagggaaactaggtatggagtcttataggaaggagtaataaaaacattaatgcaagatgaataaaggtaaggaatgtacttgctcaataatttctaagtatatttagatatttggcattttatgtataaaagatatatataatttaaaatagatttgattaataaaccttaaatcaagtcacaaagttaccaagttttaccttagaatattggcagcaatattgtaaagcactgtcagtagattaaagtctccttcgcaagtaatcctcttgtccgaagtctggcatcttttaataatagagacctgatttcctgttggaacagcagtg

SEQ ID NO: 34730 - DNA, 1166 bp, Mus musculus
tgtttctcattgaagattttgctatcttggtttttaaaaataactttttaggtagtatataattaatatactacattaatttcattatgagatttttatgtatattgttatgttttgctctttattgctctcttctactgtatccttcttccttttgctagcctgcctctctttttctctctccctacttttgctctctctaaaacctagattctttagaagtgaaaatgtggtattttgtttcttttcttattatccccttgttcttctctccttcttagacctcctcttctttcttaatcccctttcctttcatattgtgtgtatgtatgtggtgctcacatgcacatgtgtgtgcacagattttgtgtgtaaatagattttgtatataagagaaaatgtgataatgcatttgtttgagtcttgtttcatttggcatggtgatctctagttccacccatgtgcaaatggcatttcattcctttttatggattcctttttatacaattccaatgtgtatatctatcatgtattttcttcattcattgataaatcttaggcaggcctgctatcctggctactgtaaatagtgagtagtaataaaacggctgtgtcactctctgtgacatactgacttggtttcctttgggtgtattcatggaaatgctatcgctagatcactgttagttctatttttagtttttgagatacttccagctgatatttccatagtggctgcagtttatgttctaccaaaaatataatggcccttccctcttacatctttgccagcattctgagtgggtttagatggaatctcagagcagtttttctttttttaatgtgcattttcatgatacctaagacttttgagcatttgaaaagatacttcctgccatttgtattttttgttttgagaactgtctgaagttcatttgtccttttatttatttacacaagatcccctcttgtagggtgtaactttttcagttctttatagattccaggtaacaatcctctgccaggtgagtagccagctgatggcttcttgtgctatatagaaggttttttagtatcatgcagtcccatttgtcaattaagtcttagaagtatcttctgtgctattggactgcttttaaaaggttctttaaaaccttgaagtgttt

SEQ ID NO: 34731 - DNA, 1206 bp, Mus musculus
gcctcatcacctccctcccctcggggtgatctctccctgacccgaagcttctctctgcctttgtgggagtggaggccagactggttggaagatgctgagatcagccacacccagaggctggggagggggctgcctccctggcctcctgattctagggcctcttcccagcgaagttggctaactggtgctgtgcccaaggctggtggtaagtatctggctgactggctaacattaattaacaattaactaactaactaattaacaattaaccttaattgagaagtcctggagaagaaccaaaagggagcttggggttttagtaactctattctccttcaaattccagattcctcctgaattgtccctgagaaggccagaagagcacccagaccactctcctgtctgtcccctggctttctcacatgtggaggtcttggcctatgcttctctgtaatagaagtccaccgtcactaggcttctggagagctctgtcattgggattgttaaaataaatgaaagcaaaccaaaatatgatcacgggagtcttggattcccactgagaacaagacagcatcttcaggacagcagactctccacaaccagaacctttggcctaagtaagcctggctccggagctcccacctaagtggatcatggaaagaagggaagccaaccaggtcttcaggaaggacagaaatgttttttggtgagggctatggtggaggacctgtggaagagccctctcatatctacttggactcctcccttagaggccagctcaaccctttccccagtcacaccatgcaaggaaactaaaggagaaaggtcgtggatgcagtgggccctatacagcgtcacagtcaatgcttcaaagtgagatcaatggaggagactgaaggaaaggacgcagggaaacagggaaccaatgcgctattctcattctaccgccactctgagcttaaggaacttaattctataaaactgtaaagacgagttctgtgacatcattccttgggctctattttgggaagggtacctgcagaggtctaagagttacctggctagagacagaatcaggccttcattgttactcagagaatggcctcatttctttctggcatgcaattgaagggaatgagatatacccagcaagtttaaatgaaatgtaaagaagaggagtaggtgggtctaagggtctgtagatct

SEQ ID NO: 34732 - DNA, 1200 bp, Mus musculus
accaactaaagccaagcgtttaaatatgtgagtctgtggaggccatgctaattcaaacagcctcaccagggccggagctcaaggaaggagtctgtaggacctgaagcagagaccacacaggagcaccacatactggctggcttccttggcttgctcttctacctttctttctttctttctttttttttttttttttttggtttttcgagacaaggtttcactgtatagccctggctgtcctggaattcactctgtagaccaggctggcctcgaactcagaaatccgcctatctctgcctcccaagtgctgggattaaaggcgtgagccaccacgcccggctctctacctttctttcatagttcaggtgtaccttcccagggatagcaccacctacagtaggctgggcccgcctatatcaattagcaattaagagaccgccttacagacatggttacaactagaggcatttcctcaactgagtttccctcttctcaggtgtatctaggtttgtgtcaagttgatacaaactgtgactgaatgtataaaaatttatataaataaattatagtagtgttattgaaaattaaaaatgtggactttggaacccaatttaaaaaatattgcattaaagctaagctttagaaggctgaggagttagctctgtggtagagtgcttgcctattttctgtaaggccatggagtcaaatacaaaaaaacctggtaatgaaatgtcccctagctctatccttttagaaaactgtgtgaatgtgatctttagcacagaagcaaagagtcactgagagcagtcatgagctagctagctgcccagggagtaaagattgtaattaggagaagtacaacgctaagtgtttagaacctttgacccaaaaacaaatctctaggccccagtttttagaagtggaagttagaacagtaatgtggaattgccatcgtgtccctattgatagaaatgcaaaaaggaaatgtgcaggggctggagagccagcccagagagaagtttacagccacctgtaactccacctccagggaatctaatgccttttctgatctctaggtacccatagagacacagaaggctgacatacacaagtacaccgtaggcatgcactcatgcacgcaaatgaagcaaatctgaaaaaaatccagtaatgcctttgtctttagttgtgcaaaataaa

SEQ ID NO: 34733 - DNA, 1138 bp, Mus musculus
gacacctgcttacaaaacaaaacaaaactgtagatcccacattctaatagaaaatgataattatgttcttacaatgctggggattgagcctagaggcttgcatatgctaggtaggcacccaccctgtcatgttcccacatatcctagtcctgagaaaataggtatattaaatagctaattcaaaccaagtgttttactcttgtaattccagcatctgacagtaggaggcagaagagtttgagcccagcttggtttcatagtgggatcttgcttcaaaataagtaagaacacttagctcaggacaaaagcacctcagatggatatctctgatagagccttattggcctcagtttgaaaaccatactctgcacttttgcataaggagtggggtgcttggcttttggttttgttgagaaggtttttcatgctttctaaaacttcttttgcacatcgtgcacatccaggtgatgctgcgatttccctgcctgagcagcagagtgctattgtcctgtcagtgcttagctcagagaacccctcctcttaatgcagggtgtgcagtgtccagtcgtgagccaaaacccttcatttcttctcttgctgaaattaggaaacagcacttgggctcactgaggtcagtagtgttgtgcccgtctcattttcccttcatttaagtaatgcatccgtaccactacactcagaaaatagagagcgttttacgttctttactctagcatgaccacacatccccaaaacgtttatatttcaacaagacaagtaaacctgctggtaatttcagtatatttccatgtggcaaaaccaggaaagagatgattttattttatcaaactccaagaaaatatatgggtcattcatgcaccttatttcactattcatgttgagttcccttgcgcttgcttcttgggaatatgttgccagtgagcaaggcttaattctctgggtaggaagtgaggtggcttttcctcctttgtttatatgtcagtatgttaattacatgttacagtcatgctaagcctacaaacagttggaatggattggttggcagagctggatgtttctgaaacttgattctgggtaaaagataataacaacatcacacgccttcatctaggtatgaagt

SEQ ID NO: 34734 - DNA, 1303 bp, Mus musculus
tacttgaagaatttgaccgttaacttctctttctaggaagcgagataccatgcagaatattgtacagattttggagtcggtgcagttgaaatgggaactgtttcagagttggacagacttctcaaggctccatctttccaataaattggccatttttggaattggctataacacccgctggaaagaggatattcgttaccattatgctgagatcagctcacaggtgccccttggcaagcgtcttcgcgagtatttcaactctgagaagcctgagggacggatcattatgacccgggtgcaaaaaatgaactggaaaaatgtttactacaagtttttagagatcaccatcagtgaagcgaggtgcctagagctgcacatggagattgactggatacccattgcccactcgaagccaaccgggggcaatgttgttcagtatttattgccaggaggcattcctaaaagcccaggcctttatgccattggctatgaagaatgtatcgagaggcctctctcaccagatgtggagcgccatgctctggacccagggaaagagggccgagtcgacctggagaccctctcagcacaagcctcattacaggtggaagtggaacccacccggatcatctactgctacctcggtattgctgaggtcaggactctgcagcagtgcttgtttttacatttccaagcaaatgccaaaaccttcagtaaagagtgggttggtattaatgggtttttgtctcagaactgtattgtggatcctggagtttcccccaagtccatctacatcaaatttgtagaagtagagagggattttctttctgccggctcattagttgagtgtctggaaaaagccattggataccccttaaaatttaacaactgagtgtcatccttcataaggatttgggcttgtgcagtcttgtcccttcttcccattacccagactaccccacgtccagatgctgccgtcggactcttcatgggagctttttccacgatgagaccaatacaacctctaagaaatcatagactctgggcaggaaaagcagacctcacctgaaatgctcattttgagcaagcaggtcttgcatggtgggtcagttcttttttacaaaaagaaaacatcgattttaaaactggttttagagccttgatataagcaaatgtaggtacattccatattggacaaaacttatactttgagtttcatatgaaattgaaaattgtatttttttcactgtttcatttttacacatctctataagtattatttacaaccttgaataaataagcaata

SEQ ID NO: 34735 - DNA, 1168 bp, Mus musculus
ttgcagatcattgtccatcattggaggaagtcaggacaggcactgatatggagtccatggagggatgctgcttactgacttcctcagcttttcttatagaagccaggagcaccagcaaaggaaaggcatcagtgactctgaggtgggccctccattggtcactagttgagaaaatgccttacagctggatctcatggaggcatttcttcaactgatgctccttcctctctgatgatgatagcttgtctcaagttgacactcaaaaccagctggtataacagttctcatccttgtctagagagcagtaggctagcccagtcaccttcctctgttgatgctgacagaaatataagacacaagtagaaccagcacaggctaggcacagacatattaagctcagcttccaaaaaggccaaagcaagccccatggttgaacttggaatcagtgggtcgataatagcaaagaactgcagtcacattcgacaggtgtggctataaggagggaagaaatgagtctttttgcgacttgccacatacaaagtggacttttttgcttccctgtagtgcctagccccctgatgcacacccatctatcagttccttattgctttgtaacaaattaccctggatcagtagtttaaaatattatctatttatagtccacggactagctcatctgtgtcctgtgtgttgtaagacttgcttgtgtgaccatagtttttgttttgttctttttgagactgggtttctgtgtatagccttggccatcttagaactcactctgtagaccaagctggcctcattctcagaggtctgactgcctctgcctcctaagacctatgattaaaggcgtgtgccaccattgcctggctgtgtggccataatttaattataggatccagaattaacatgactggccccttagctggtatttctagctgtctccataagctatccaaggtttcctctctttacaatttctccaacagagtagctggacatttttgtcctctcatggccaatacatggtttcaagagcatgaagccacaagcagtggtctctgggaaaagacccagaagctgcataaaaatccggccacattcagttgatcagcaaagcacagggccggcctggactgagtacattgtaaaagaccatgtggttgtt

SEQ ID NO: 34736 - DNA, 1278 bp, Mus musculus
tattatctgtagcttacatgaacatctattattaactttttgctctgcaaacagacacagtctggtacaggttcttattactgtaggaaactggtctttggctcagaatggccttattttctccccttgatagtatatctggaagaggagttcccagttttttggtaccatctaacttgcctggcctttctgtttttctcttattagatctcctgttgtagtgaccgtcattgcaaatggcttccagctcctgttaacactttctccacccagactctgattttggatctcaatgcttgtcttggcacagtggttgctgttcgctatgcctggaccacatggccttgtgaatataagcaatgtgctgtttaccacaccagcagtatgttgccagctcctcccttcattgctcaaatttcacacaggggtatctaaggacatttggagtagtgctcgctcttctatacaagggcaaatcctttagtttgggtatgcaggactttaaaagatgactgctgtttttagggcaatgggataaacccctcattgaatagctcccagctagcatatggcccctccagtattctgacataagcacaggctagcagatacttgaaatgctcatctctgtcctctagttaacctaagcctctgtgctggtctaattctcaactatatcactgggccttactagcattcacttccttggtattagtgggagtaatatgccctattcgtgcccttcttcactactctcggactgtggactctcggaccagcaagggactttaaaggctgtggaggctggtgctttgtgtgttctttacaaccccctgaaaacggctatgcaagtttccatgtgtttccttctgtaaaacaatgctcttgtcaaaccttactaccccatgacaggcctttcaggtcgcctctgacagatcatgtgtttttatcactaggctctccaaagctgttgtcagcctaactcatactctaaagggaatctgtgcatattgccatgtgctaaggagtggccttaaggaagaaagagggcccactgcaggttctcaggcagagggtggggaaatcacaggcacagggacacgcggaagtagatgtgcttggggcaaatagctctttaaatgtaagtcttaggtccctgaggtaaaagttcaactaagcctaagcctaattcccacggaaggaagaagttaggctgaaagttacagaacatgcttatagacctacaggtgattttgtagtttaccatttggttaaaga

SEQ ID NO: 34737 - DNA, 1224 bp, Mus musculus
tttaatccaagcactcgggaggcagaggcaggcagatttctgagtttgaggccagcctggtctacaaagtgagttccagaacagccagggctacacagagaaaccctgtcttgaaaaaccaaaaaagaaaaaaagaaaagcagggtgcattcaataaaaatcggacttttggttttgttcttatcttagaacagtgatacgcagtgtaatatcagtaatattagctaatggtgtgaagccatagctcccacacagacccacatttgtagtgatacttgacactccacagtgtactcagttgcctgatgtttgttaagttaggtatatcacacgcattaacatactgtattttcgacttaccttgggcttatggaataaaatcccatcacaaagagcatccatatcaatcaagattggctttctacctttatcattcatgtgtaaatttccctaccccttggcactggaagagacctaagtgggtgaccccagattttcgtttcagttctgaagaaaacatccaagaaaaagaaaatggagggaggtgctcgaaaactggttcgacccattgccctggatccttcaggacagcctgtgttccccatcggactagggggtctgacagtatacagtctgggggaggtgagtgagaccagcatatggccaggctaatgagaaccatgagagtggggttgagcctttccctgttcccactggcagcacccctttgttgatccatactgaccccagaaaatctctagtcccttccaaaccaggtcagttttctcttctcacagccatcaccttctatgtttgttgtatcactctttgtcagccccaaagttcctctaaaggctaccatagtaaactgggctctaaagccttaagttccagattaaggaatcttttatagatcatcaccaaccgacctggcttccatgatgagaatgccatctatcctgtgggctactgcagtacccgagtgtatgctagcatgaagtgcccagaccagaagtgtctgtatacctgtcagatcaaggacggcggtgtacagcctcaggtactcactgcattatgattcttattttcctttcttggttctgttttttcttgctgtttggagaacctccttgacccctggctttttagctatgtggctaattctgacatactttaagatactctgctcaccatttatacaacacagagatgcaggaaaactgg

SEQ ID NO: 34738 - DNA, 1316 bp, Mus musculus
aagaggctcagtcaattggtttgacactactgaaagaaaaaaacgataggaagtatgtgtacttgaaacgctcctggtttcattttaaaaccactgaaagccgaccttgtgctacttaacattttattaaaacagtttgctaactagataccaagctttggggcaatcaaggtcttgttttactatccccgaagttcacagcctaagaaacacttgtgcgatcagcacatatgggaaactgagttccccgcattagtatttaagtctgctaaaaccccaggaaggcctgctgctcagagcaacctgggaaagcagatgtggacgtgcattccctgagggcacctgcctgagcgtctgcatcaggactttaaactcttccctacttcgctggctatcagccgggtaggaccggttctttccagctccagctccttgcaaccctgagccacacccgtcctcccagcccaccgctaggtccgaaccaccgcaacttccaaacccggaagttacacgtggcggtgcttttgcgcaacttccggcgggtcttccttgggaaatcgactgggaagtgccgaggatcgccatctgtttctgcctgcgctccatcccctccgcgccccggagctccagaacccggtctgatcatgagcgtgttgagcggcctggcctccgagccgcgcaccccgctgtccagcaaggccaggatgaaaaggctcccgaggaagagccagaacgagaagtaccggctgaagtacctgcggctgcgcagagcagctaaggccacggtgtttgtgagtctgggtttgggtggggactgtcttccccacctcaactctctcagagaaagaatatccgtccagtgttagttgcctcgcttgggaatattagttccatatccttgcataagttattcctctagtcctgtcaactcctctataaatgaggactgaagagtgctccgccagcaaactttagtcattaccttcttgctacttttcgtttcgagcctaaggagtgtcttttaaggcgagcacactgaaatgaagcccagagggatgacgtgccctaactccaacttggataccctgattccagtttattatttactctacacagcctgtttcctaagtacacccaaccctaacgccatggctgccgctttcgtaaacaggcacctaaatctttcaaaattgtcctggttgtagctccctttgacgaggcttctaggtgtttctgccttccctccatccgaaactgaaagtggaactcaacatcaggaaacaggctacctcctcctgctgaggtgtatagacact

SEQ ID NO: 34739 - DNA, 2069 bp, Mus musculus
gcctggaagccaaaggcggtctacacagctacaaaatgagatcgacatgggattccctttgactcgccccagttggaactgcaacatggctaaaggtagggagagcttgaaaatctattcccaggctccggtctccaaggtgcttcaaaacgggcccactaatttggctaaggtaagaggtaatgcaggggccaattgaacctccctcagtgttccttgaaaggcttataaaagccttcagacggttcactccctttgctcttacctcggaagcccagaaggcctcagtggccatggcctttcataaggcagtcagctcctgatattagaaagaaacttcagagattagaaggtgtattacaagagggagacagttatgtgatctagtgaaagaggcagagaaagtatgtgtgtgtgagagagagagaggcaggaggcaaaagaaagaaaaaacaggagagatcatagacaagaaagaaatttgccacagtggtaggaaaaaaaaaaaaaaaagacaggatctagacaggaaacctgggcaactgaagaccgagcctcagctaaagaggctcagctgtgtcagactgaagtgacttatttgggatacacccttcgaggtgaaaagcagtggctaaaagaagccagaaaaagactgtaactcagatccccaccccgactacaccaaggcaagtaagagaattcttgggtactgctggtttctacagactctaaatacctgggttggcgaccttagctgcccagttgtaccccctaaccaaggaaggggaggtgtttgtgtggaacccagatcaccagaaagcctttaaagagattaaaagggccctactgatggccagcctatgcctgacctaaccaagcccttcactctttatgtgaaagagagagcaggggtcaccagaggagtccttactcagactttgggactttgaaaaaggccagtgacttacctatccaagaagttacagcctgttgccagcgggtggttttcttgcctgaaagctattgctgccataatctgcctgtcaaggatgctgataagctcactctgggacagcaaataactgtagtggcatcccacactcttgaaagcattaccaatgctcctgtgacacatcagagctttttgttgtctaaatgagtgaccttcgcttcattccacctgctgtcccactgcgtgagactgcacctactcatcactgtgctgacattctggcagaagaaatgatctgaaggatcagatcagccttggcctgagggtacgagctggtacactgatgacagtagcctcgaggttaaaggtaagcagaaggcggggacagcagtatggtggtgaacagaaagcaagtgatctaggccagcaggcttcctgagggacgtcggcccagaaagctgaacttgtgactttaagacaagctctataaatggcaaaataaaagtctacactgacaacaggtatgcttttgccactgtacggggcaatatacaaagagggctgttaacatctgcagaaaaagacctaagatgctgtggctaaagaaaatcagatggcagatctaaccgccaaacaggggctcaaggagcaatgatcctggcagtcaaggagcctaaagattattatgacatcagagagaccagctttagatacacccctgagcactgtcaagttatggacagtatttgacttggcctgggggccaagaaattcaaaggtgtggttaggtcctttgactactatgttacaggactctctgacttggcagaaaaaatagtcaaaagctgcaaggcctgtgctatgatgaggtagaatttctaaaagaaatcttcccaaggtaattgggtccaataacggacctgtttttgttgcccaggtaaatcagggactggccaagatattgaaaaatgattagaagttacattgtgtatgcaggccccaaagctcaagacaggtagagagaatgaatagaaccattaagggacccttaccaaattgacagcggagactggcgctatgattggatagctctcctaccctttatgctcttcaggga

SEQ ID NO: 34740 - DNA, 1180 bp, Mus musculus
gtctttgatttgatgagtcagaagatgcagaatgaactctggatgttcactgactgcagagatgttggcagaggcatcagtagaggcagaagttgaagttagctgaagaacagaaaagataacttcctccctttaccattcttatataaagggcagactgttgtcagagcaacaaactactatggaattctctgtctgttggtttgacccttgaccttggtacctagggcattggaaccactaaggttctttgaaagagctacaatgtgatgaggtctgatttcacactcctccacacacactcataccccttcacacccctccatctcccgagagagaaagagagagagaggggagagagagagagagagagagaaagagagagagagagagagagagagagagagagagagagagagagagagagagagagatttcaaagacttaacgggcttaactgaagaggtcctagtcctgtactgcatcggaatacttgtgtagagggttagtgacacacagtggagattgagaaaaggagaatcctaaggtcgtttggatgagtgctcagttagttggaaccataagaggtaatgccttcacaggaccaaggacctttgggttctttaagaggggaattctgtgtaaatctgcaggaagaccgtttactggaaagtactccagggaaccacctatgttggtgtgtaatgataatgggtcagaacagaaattgctggaaatgtaattgcaataggggaaacttaagactccagaactctgtgaacacagtttagttggccattctagtggaagcctagaagatagtacttctgattatggagaccttgtacaagagatttcaaagagaaacaagatcttttagcaactgggatagaggtaatattttgtcttagaacctagaaactttctgcctgtgtcctgagaatttaccttagtctagatcagaaagaaatgtactaatttctttggtggaggacatgttttataattaattaatttaattaacatcccaaacactgctcctcctccttccagtttccacctcaaagagtccctcctcatgccctccctttcttctctgagagagtgaggatcctctgggtagcttaccactctggcacatcaagtctcagcctgattagacacattcgctcccactgag

SEQ ID NO: 34741 - DNA, 1190 bp, Mus musculus
atcttatatctcgggtatactaagtttctgggctaatatccacttatcagtgagtatatatcatttgagttcttttgtgattgtgttacctcactcaggatgatgccctccaggtccaaccatttgcctaggaatttcataaattcattccttttaatagctgagtagtattccattgtgtaaatgtaccacatttttttgtatccatttctcttttgaggggcatctgggttctttccagcttctggctattataaataaggctgctatgaacatagtggagcatgtgtctttcttactagttggaacatcttctggatatatgcccaggagaggtattgcgggatcctcctgtcgtactatgcccaattttctgaggaaccaccagactgatttccagagtggttgtacaagctttgagttaggatctttttatgttttgtattttctttgattgttgtgccaatgttctccatggaatcttctacacctgatattctctcttccatctcttgtattttgttgctgatgctcgctttgagttaggatctttttgtgttttgtattttctttgattgttgtgccaatgttctccatggaatcttctacacctgatattctctcttccatctcttgtattttgttgctgatgcttgcatctatgtccagatttctttcctagagtttctatctccagggtagcctcactttgggttttctttattgtgtctagttccctttttaggtcttggatggttttattcaattccatcacctgtttggtcatgttttcctgcaattctttaagagatttttgtttttcctctttaaggtcttctacctgtttagctgtgttctcctgtatttctttaagtgagttattaaagttcttcttgatgtcctctaccatcatcatgagatatgtttttaaatccgggtctagctttttgggtgtgttagggtgcccaggactaggtggggtgggagtgctgccttctgataatggtgagtggtcttgatttctgttagtaggattcttacgtttgccttttgccttctggtaatctctggagctagttgttatagttgtctctggttagagcttgttcctcacatgattatgttagcctctatcagcagaccttggagactagatctctccttagttttaggggtcagagtactctctg

SEQ ID NO: 34742 - DNA, 1138 bp, Mus musculus
gtcgagtcaaatgacactgctctaccttctctgagatcaggagatcaatgagttagcgccttattctcccccgcccctgggttgaatctcatattggcctttgaggttgtgtctttaaactttcatcagtgtaaaggtacagcccctaactgagctccctctcctgctcacagctcaaactgtagtaaggtcgatccctcacgtccttcttagcgtaacattcacggccgtcgaggaccttgccttgtccacttttccagccttgccttgttttggcaaacacagttctcttgtggcacagccagcctcacttgctttggttttatctgcctgcttttgtgctaaacggcagacttgagcagttgtactagagatcacacaggcccccagcgcgactaaaacaccctctatgtggtcctttgcagacgggagtttgctcactccgctcttgttctgagagagcaacccttctcttggcttttcagtgatcgcttaatgctcttccccactatcttcattgtagactaagtcctacttgacttcttgatctcagcttaggggtcccctccacagaaagtcttctccaactttctatatttaggccagctaagagaccgtatctatatccttctaacaaggatgtcttgttagacatgtctatatctggccgtgtctatatctgaatacttaaagaaccaaattatcctttttttttttttgctttattcatagatgctaagctgaggatttcaatagtatctgtgggacctacatatagaagaacgtgtgaagtaaacccttgatcagcatttgctaaatgatatataagtgcatagcttgttgacagtatgcccccagttatctataagtttgtgtagactgacgtatgcatgcatttaaatgtgctgtctccttgtattttacatacctggttaagtcataacagaggctatgttctacataatttatctccaagtctgctcttgctcttgcacttggcttctccttattaaggttttgccacatgtaaatctccctgctttatcttttcctaaacaggaaatgctgtttcctttcttgtttctgcttccagcatttccaggttgcctgagtccccaagtctttcttacctcattta

SEQ ID NO: 34743 - DNA, 1299 bp, Mus musculus
ccgagtcgcgcggggcccagcgggtcggaacacgtgggtcctctgcgcccggaaccggaagcgaccactcgccccacctccaaggggtgctggagcctgtctaggctgtaggaggtttggtccactcgttgtgttcctgttggtcgaagcctggggcttctccagtgagacccatgccgggaagcattccctggactgctgccctctatggccagtcccctttgcggcaaacccatcaccttcctaggcgtggtattcattgtccacttcctacagggttttgttttcatctttcatgttggttttggtatctacatctccacaagagaatcccctccttcccacgcagttttcttttccttcaagcatggaagaataaaaaaagaaaggtttagatttgaatgctggctccttcatgcacagctgttgccgggccgccagaacatctgcctgtcaactctgtccgtcttgaaaaaacacaaactgttggtcttagaactaaaaactggaaggtagactgaagctcagtaaggaaatggtggtgttgtctattaacctttgtgtgctattttggtgcctctttgccactgtcttccctgatctaagttgttcatttttgtctttgtccctaacacttctatagtccatcttgccctgaatgtcacatggtgacatgtgcaagtcttctcctttcagccatttcttgaaaaccgtttccgttcatgggacaaactgctcgagactgcttagcatactttgaactggacatgttaattgcttttgctagagaggcagctgtgttctgcagagggtgttacaacacccttgatcaaagctttgttgaagccccaactggaagactgttcttcggtcaaaggagtggatggagtctacctctagcctggctgaagaccgagcaatcgtgagatttaatccagttgtgcccagccaatcacctgaccaccccaccagaatgcaagttcacttaataccgtggtaaaagacatgggagttggtgacggtatccctttaatgagatagataatgtactttttcagaaacctgattctgttcagttcaggcagtcagtgccagaatgggcaggtctgtctgcccttctgagtcctgactaaggtatacttttcccctcctcctcctcttcctcttcctgttcctcttccccctcctcctccccttcgtttttttttttttttttttttttttttttttttttttaaatctttatctgaggacactggacagagccaaagtatgctttttctgttacttggagccttt

SEQ ID NO: 34744 - DNA, 1177 bp, Mus musculus
aaaacaaacaaaaaactaaactaaattcttgactgttgtcttccaatgctgctgtgccacaaaaggatgtaacaatatggccattccactcgccaaattcttgaccttatttcaactgctatgtatacagatgcacaccactgctttccatgtaatggtaacatggctttggaattttgaatatgtatctctactctcataagccacatggcacaatttctctaactctcagccttactcttgaaaggtggttaacatgcctatctcacatgcttattttatggagtaaatgatataatttatataaatctcttggcgtagaagatggcacagggtagatgttcaatatggctcattttctgcttcaagctcctttaagttcttttgagaaatcaagacttagaaaataagcatacagtctattttatttcttcataattacaaatgaaaaatgaggggaaagggttggtctgtttattgtcatatcacaaatgaagtgttaaactcaaaccaaaaagcaaacaggacttgctctggaggcagtataaattgaattaagtaagttgttgaacacagatgggacagaaccttggtgatagagtctttatctgaagatggaatcagtaaggcttctacttacccaaagcaaagacccttccctttctgcagttgtcaggatgcatgtgactcatagccatgaatatgccaagtcttgtgaaagctcaacccggaaggcaaagaaagtgaaagtgacgcatgccctggcttttgtccttctagcatgtcatgatcagtgtgccttaaaccatgctgaaactggtttaattccgaagacctgggatggagtccagaactctgcattttaggcaagtgctctaccactgggctacagccccacctggagaaatgttttgttttgccacttcttctctcataaaagtcatatttgagaagcaagagaatattggctcaaagcttattacaatagcttttaagaaacagaaagaggaatggaaaatgagaagataggaagaagaggagaggtcaaataggcagtggctggtacaagatggtcaggtggtcagaggcttaattatcttctactctgaaatttgactgcctttatagtcaacatcaaggtttaaggtgaataaaaaatgtcattgacaatatggta

SEQ ID NO: 34745 - DNA, 1201 bp, Mus musculus
agtccaacaagcacatttgtagataacattattttttagtgccaaaagtttggacaccccaatttacagtgttctcattgttggctgtcacagtaaatctaaatctggtcatgttcttcccctagtgaagatcattcaatcattcctgcttttctcttaagtaagattctttaagtatatcacacactagctggccttaaggtagttattccctttgcaatcctttatagccatgcgctcctccccccaccccccattcctgaactgggtgcatacaatctttacaagtgtcccatgaactttagctttggaatagcagttgttaaaattccttcccaagggaaaacataaacaatatctatcctttgtctcaagttcctaataaatgaaggcatgattccaccaaatttcactctagggaacaaaagagtttattggacatccttatggagtataggtgaggggttacttacaggatgtggtcactcttcccccaaagttcacacctagaaagctttacccaaaggcttccccacaactgcacagatggaagccctgctctcgtcttctctggtgtgactgtgtgtattctggcccctcctgcagggaatttgctgagttgccagttgtatacttggggttgggaatgaactattaaaaaagcgcagctgggatccttggcaagggggcacagctgaatgctccaagatggaagctggttggcttggagaaaagtcacacatgactcttagtacctgtgacctttagcttggctaaactttatcttttaagacagcttaggttcatgtcttctgaaatttaatttgatcctattctctctacccttacacatggttagaagtcacctaaatgggtcaaaagcaaccttggtccatccattctgttttctgtcttattacatagccactgcttattttccttgagaaacttgatgttagcaactgtgatttttttactctcctattacaaagaacacaataaatgcacttaagccctatgaatctctactctcatactttcttgctatcttagcacccatagccagtcttcccccacctatactcatactttgctgggtcattgagtcttgttaattctgtctaacaaatgtctttcaaatccatcatgtcttcatctgcattaaatgctctagttcagtatctgccacattctgagtgac

SEQ ID NO: 34746 - DNA, 1656 bp, Mus musculus
gggaggaacactcacaaagggaacgagatgaggaggggaaactcaagctgcaaaggcacacgaagaaccagttatctttacaaagacaaggcaggggacaccctaggactcttctaatttcccccttctttcaacctttaatctcatcacctggggccctgaggtttccatctatccttcagggctgcttactgtttgttttctcagattaccatcctaggaaaggggtcttgggattaagggtctaggtgaaactagaggaagtcagaatagttgctttctaaggaccccaaggttcaacatccaaagaaatttaaaacccaatctttaggtggcacaggcaggtgattcaaagcctagaaagtcacactcgcacacatccatcccggccccaccgggctcatggttctagatgaaacccaaaagcagaaccagtaaaatttaaaggataatttatgggaccctcatactctccccagatccagccttgaggaacagtccccctccacatcacacagatcaggactccccctcctcacccaccgccttggtctcctgggttgtttctgcaaaccctccaccagcgtcactgcctcctcgccactctcgggccgctggcctcgcacccagctctgcagttctccaggcaggacagtgaggaactgctccaacacgagcagctcaagaatctgctccttagttctcctctctggcctcagccactgatgacaaagctctcgaagtctgatgagagcttctcgagggcttgatgcttcctggtatcgaaagcgtcggaagttctggtgagaggtctccagtacaggatcatcgccctccaaggcggattctggcccgcacgtgaaatcatcctccagtttcaccatcagaactccttcttcttcccaaagatcttggtcctctggctccaaggctgttgccatttcctggctcttgggtgttatcacaccatttagccctcacactggcgataacgtgttttagaccgggtagctcaaggggttcctcctaagggacctagggtagagtagtaaagatgaaagagaatagaagcctgcagttatgcagagacaacagttctgactttgtgatcctttgtatacttctgaaataattaactccccccttccccagtctccataactgcatgttgcaataaaatcaagttgggataggcctggcaaggtcctcttccctcacttcctagggaaggttcctagcccataaaaaaacagtacaccgctctactcacaatagtgtggctttacctcctaatgcctttcttctacttccttcctgctcagttctttagtttggctccttcaattcctgtctgtactacagccagcacattgtgagttccccacagtccttacatggttgggagaaacgatgctcagaatgcctacaaacaatgccccagtggccatgatttgtttcacaggcgtatagtatttatatcttgagccatcagcagggtggacatatgttacgcaaggctgcacgaaactaatattaaccttggtcaaatggaaactcttggagattttcagcactctagaggaaagacactaacagcaccacccccagagcctgcctttatcttgctaagacatctttaccgggatgactcactga

SEQ ID NO: 34747 - DNA, 1204 bp, Mus musculus
aaaataactcttacttcctttaagttgatttcctcaggcattatgtcatagcaaggaaaagtgaccaatgcaagtagatagaaatactcatttgaaattcaagttgatgcgtgtctctgaaattccagctgcttattgatattatgacatttctgcatgtggatttttactgatgacagagcaaatgcatattcctttggagggtggtgaggtgactaaaatgtaagatgctgtttgagcttggacgccatgcgggctcatggaaggccagcagcctcaggtacctatcaagtgcagcttttccgctaaaaacgtacagagaatcctaatttgacaacactcactttttgttttaatgtctaatatttgcatgacagagtggttccctgcccccagcactcactcactcattggctccgttcttttagccttttctgcttgctggccaccctgcccacatccccagaaggctgatcagaaagctgagatgggggtggctgctgtccctgcctctgcagctctaacattgcgttagagcaggtggagatgttcaagctgagaagaaagtacagctatatttacttgggattgtggttgggagaatggaggaaggtcccctgaaagagctttgctttcaaatccttaccgcccacactctaggatctgtcactcactcactcactcattcatttatccactcaacagtgtttagcatgttcctgctctgtccagtgttgaacagaatgttattggtcctgttctcagaaaatgaatattatagtgtggaaaaagtcatttggacatacaatacacaactcagtgttgggtattaacgtgtggcaagatgacgtttttgtttgtttgtttgttcgtttgtttgtttttgttttgagacagggtttctctgtgtagccctggctatcctggaagttactctgtagaccaggctggcctcgaactcagaaatccgcctccctctgcctcccaagttctgggattaaaggcatgggccatgactgcccggcaagacgttttaaaagcaggtatcagaaagaggtctctttgagtaagtgacagctatacagggactttgagatcaaaggacaacctgaggaaacgtctggggaagtgagtcctggagagagaagagaaggtgccaggttgtgagacaggagcatggaaccgagtgagcagtaggcagcta

SEQ ID NO: 34748 - DNA, 1180 bp, Mus musculus
agggagtggacattaggagtggaaggcaagttgtggcgggagaggcaaagccttaattttatgatttctcaggcttttcaggctttaggatttccatttttaccaatctttgtatatgctttcaaattaagtagtacatataaagattatatgacattttttttgtgctagaaaatgttaaaaaaaaatctgacaatgtaagttgtatacttacaaggtgaaaaattaacatctaggctactatacctgacagttttttcttctttctctctcactttctttctttctttctttctttctttctttctttctttctttctttctttctttctttctttcttcctttccttctttcttccttccttcctttcttccttccttccttccttccttccttctttccttccttccttccttccttccttccttcctttctttctttctttctttctttctttctttctttctttctttctttctttctttccaaaaacagtctaagaaaataagtattaagactcagtttaacactaccctatgactctctgatgggatagccactgtcacgatgacagtggggccaggggcatccttgagtgcagaggaagtctctcctcccaggcttatagaactcaagagctattggttccgggtccctgtctctcagatttgaatagtgaatctcacaggcgtaggaagatctaaatgggatgtttgactgtggagaacaagtttaagaaggactcagatttattagaaggtcagcatccttagggctggggagatggctcagtggttaagagcaccgactgctcttccagaggtcctgagttcaaatccaagcaatcacatggtggctcacaaccatctgtaatggggtctggtgtcctcttctggtgtgtctgaagagaacaatggcagtgtactcatatgcacaaaataaataaataaatctctagaaaggaaaaaagatcagcatccagagctcccatttgatgtgatggaagaaatgggagagagacaggcatcactctgggctccccttttggaagggcctctacgtagtgtggccattgagttgttagcttatggacttttcataggactatggcagaaacagaacaaagatgaactatttttattagtcagctaatttgagggggattgctctgtgcatgat

SEQ ID NO: 34749 - DNA, 2539 bp, Mus musculus
aagcaaaattggaaattctcagatttattacatatgtagttctttactaggtttaattgttaaggtaaccgtgatcttttaaaacaatttcagaagtattcattggggtgggatgggagttgggggacaaaataaagtaacagaagtggccctaaccaccaagaactgctgttcgttgacctgcagtatcatttagaggaggagagcacctaatttgtcagagaaagcctcctgtcatctagtgaacccagatgatatgtgtacatgaagaatagcccccaagaatgatggctttctcgtgagttccttctgtcttagcattagcttgggtttttacacctggaagaaatcaaaatatcagtttattctcagaaaaaaaatctttcttccccttcgtccatactttgtgaaaggattgggaattcaccccctgcagccaaagtaccctggacaatagcctggcaagcagctcattgtccacaggagggcatggaacctagctggcttttggttacttcatccagctggcaagttttgttcacttattgtagatgtaagtatagtttgatcttctgtgaggatttgtgtagcaaggtatttgaatgctttttactggactatgagagatctgggcttgagttcctggccatgttagtgcaaaagtcatgtagctttagataagtccctgacaccaagcttcaggatccaagtgttaacaggaaagagctgaaataaatgacctttaatgtggtatctaggtttgaccttgatttggagggtaggccagagatgagagagatggggagtttccagtcttggaagatgtcctgccagggcagataaactttgttcttggctagaaggtcttggggcttccagtggcagggacagtcttgctcagcatgagcacgagaacacttccttctttcctttggcatagttttacatggaattggtttatgcttagagggtaacagcaagaagagcatccttttggccctagcccatcttccatctccaggcactgtgaatcctttctactatccatactcctcactgatggaggagactatctgaagaagccattcccagttctagaacttctgtttttctcagccaaacccctgtcgcaatttgaataaattatgaaaccgttgctaaaatccttggcttgtgttagggcacgggtatcaggagtgaggagcaccagggacccgcaagaggaatttgccacaagtggattctctacttgtccatagctcctcccctatgctggcactggtttactcttctcatagactgcatctgttaggatgaggtgttggggaaacgactggcaaagggaagactcttttggactatttgtgctcccagaagggtcctttctgtgccataccatcccacttccttagctctgcagggcagccaaagccagccctggtcgttagggccaaggagaaatagcaatcttctctcttcccccaggtggcagggctgtgatggcccttcctacacacctggactctgcctacccactccaggactctctccctccccccaaccccatccccatctctgagctatggggcaatcactcccattttacctttgccatccttgaccttcgttcaccccgctcccacgcccccccccccatcctccagcaggctggccccactcccttccatctccaagtcttcttccagaggatgcatttggatcccagaggagtgttttctggaagacaatctttcaacatccctacattcctgatatgaagcaggaatttgcacatggtgtagagagctccctctcctgcctctctgcccagccttgttacctcactcctgctccagccattgtgatgggctcagccagctccctgttctgatgtgccctgcaacaacagctcaggggtcttgtgacttggagaggtcctcagcaggcctgggagcccggattggagccttggctgccgttgagaagcacttacctgccaagatttgctgatgccagacgatctaccccagcatgtgaatgcataatggacattgccatctctgccctttggtcctccttgcttctctccatacaataagacacctccgaagcaaaatggcggcccttgctccaggcaggacatcagactgtctggggagttggccctgggcttctgtgttgtgtgcagagactgcacagtaaaacagtcacttttgccaacaagaatgtgtggcgccccacatctccctaccttgcactctagggccagaccactctctgtatggaccagaccatcttcccaaacccatggtgctttccccccgaccccactcaacctacattctgaggaggggagggatggatcagaggccatagtggccccctggataatcctgacatggggtagagtcgggtgaggcagagggagcagcacccaacacctgcactgggccacaagcgggaaagaacacgggttggttgcagttgagttgttgtctggccgtctgtatttggatctttaactgtactttgcctggcg

SEQ ID NO: 34750 - DNA, 1099 bp, Mus musculus
gagtgttaccaagctagctatgacttggttgttgtaatcacgaacactcagcagctgtggctacctgcacaagacgtaaatgaagaacaaacaaaaaagcatgaaataagcagagagactatataggaagaagtggatctgggaggggttaagagggaatgatcggagtgcatataccaattcatatgtgtgcgaaattgtcaaaaatttaaaaatgaaaacttataagaagagagtcttctgatattttgtcctaccgcagatgcccagaccctgggactacaaggtaacaaactctgagataagataataatatgcaaaattgtgtctgagatggagcaatggtcaattcatacattagcaggagaaagaaaagcaaggctgcaggctgtgtagcatttggaggatggggaagcagctaagggcttagaaaggcatcccaagtaccaagcgttggctcaattgaaattgtttcctggaaatattaatctagcaattacaggtaggggagtctggaattcagggggacgacaaagtcataatgattccaaagttaataaggagatatttgtgtagggggagggggctggacagatggctcagtggttaagagcactggctgcttttccagaggtcctatctataatgggctctagcgccttcttctgtcatgcaggcatacatgtaaatagagcactcaaataaataaataaataaataaataaataaataaataaataaatcttaaaaaaaaaaaaagaagtgagatctggggagatggcccagtgagcttgccacgcaggtgtgagaaccggaggttgggtcctcagtactccctcagtactcacagaaaagccggacacaatggaatgcatctgggctttcagagcagagaccggcagacccccagaactcagtggccagccagcctagtcaaaatggtgaatggcgaagcaactgaggaagtcattagcctgtggctcccataggtgcccctgcacacacctgtgcacacgctcatataccacatgcacacactccaaactgtaaaaaggaaaagaaagaaggaagaaaaggaggtgatcaggggctggcgaga

SEQ ID NO: 34751 - DNA, 1153 bp, Mus musculus
tagtttctttgtccataccagggtcagcacctgcagtgatattggttggtttaggctgctgcagttaaaagataaacaccaactctggggagggccagcgaggggccccgaggtcatgatgatgttggaaagttttcgttatagagacacaaagaaacctggtagagctgttcggcctggacagaacaaaagagtatctttacccgcttagggtgtgccgctgaagacacacttctatcctcagaagccctaagttcaaatcgtgggtctgccacttaagattcatatactgccttgtgcacataccgtttccccttctgagcctcaatttcctcgcttgtgcagcggggatgatgatagtgagctagaagaatgtgctgagcctctgacataatagtggtctacctgtcgtgacaccaagcaggtaaggagacagaacagtgtgtgacagacacactccatgggaacacacagcctcggctttgaaattaggatgggatgctaattccctgcaaaactgagagcttggagatttgctgcaggctttaagagatgcagtgacagaaggaaaaaaatagagcttcctcacacagtggcttgagacggacagaaacttacctcttccctgttcttggggaaagtggagaacagcctgttacttagcctcctttcttctcaagtgggctaaatcacttgtctgtgtcacttactgtggaccactgatgaacacatctatctcctcctttggtcttctccgaatacttccatttccttcctaaaattgattttgaacccagaacaagaaataataactttttttttgtcagagatcagtcaaaggaccagagagttgtggtcctctgagagtggctctgaattgtgagccagtacctggccctgttgcacacatgtatgctttaagctgattcccctcaagccttttggctctcataacaccacatgttagggagaggggggcggtgtggagtgtaggagagtcctcaacgctggctgtgttaacatggagaacatcttcatggctgatggctgggatgacaaaatgttctcgttgccagagtagcctctacactctctgtgccctagaccacacatggcaggctggttattgccattgtgagaggaagagctgtct

SEQ ID NO: 34752 - DNA, 1109 bp, Mus musculus
atttttaccctcatcttagagaaatacatgtgatttctccaaaacaaagtagaacacacttgggggaaatacccttgtcaaatgcccagaacttgatgttcccttttctgtattcttcatagcttgtaaataaacccatcatggtcatgatggtgatgaatggctttcctttgatgtcggtaagcatccacagttgtctcagcttcccactgagccatgtttctcaatgtcagttcttgagctccatttttttaactaaggaatatgtttttaggacagtggtgctagcaatggtaatgggggtgatttatttcattactatccgctgtgccaatggagcagagaacaaacacggagttactttttttacacagtcgacagtggaaagtctttcaagttagggaatgtagcatttggtattgtgctgtggctagcaatgcccgtacagtttatacatcgactgaatacacttttctagtgtgttattctgcagtctttgaaatgaaggatgtgcatctctatctctaggaatcattcatagccactgggtccagagagttaatgcaaccctagtgagttactcagacaacccccatttgattttataatataaatatcaatttgcttaattattaagtgatgatgattgtgttaataatagatattactagtacacatttagactattctttggtatatatctacaattttaatctgatagtatgattaattaacaatgtattgtaccttggtcattcttctgtttttccatcaattatacgtaaattatactttatatatgtacatattaggtgttagacttgttattatttagttcattaattatcatcctacttagcatttacatgaggtattgtagtgaataagataagagttgatatttccttcccttggagattttcatctaggaatgggaccctgtgaggtttcctctatccaggctggcatgtcacctggtattgtcaccatgcaggtcttgtttaggcatctgcactgctgagattttatgagtgcagcttccctgtcatgtcaggatgacactatttggatgtcaatacaaatatatgggctatgattctgaagagcca

SEQ ID NO: 34753 - DNA, 3940 bp, Mus musculus
tttagaactctaccggaactcaccaaggcctgactgttttatcttcaggagaggacgatgaagatgctcccatgattactggattctcagacgatgtccccatggtgatagcgtgaagagcttttctcattagaaaccaaatggtgtaaatattttatttgataaagatagttgatggtttattttaaaagatgcactttgagttgcaatatgttatttttatatgggccaaaactacaaaaaaaaaaaagaggaaaagaaggaatgaataaactttgtagtatcaactgtgaactgaaaccaggttgattttagtaaccacattctttgatttgacattgatgtcatcttacagggctgcgcttgctgggcatgcttttaagtctgtgagatcattttgcttcattaagttgaccattctttttgtttttctaagacacagaaatgtatttaataaaaccttcaagagagagtaatggacggagtgcattctccttgaaaactgttcagagtttacgtctcgtttgggttcagtttacataagtgtgtgggtgtcttgtgggggaaggttctgtgctcttgtttttgttaatttattggaactctgtataaggccatattttagtggctgtctgaaaccccatgtgtgaagggccccttgcccaacagggttgaggtggggagcaagagcaatctgtttttatttgctcgtatgtcagggacaggtgtttggcagaagagacttctaggttactgctagattccaattcaactgccttgtagcctgggaagcccagcaagtcataacctcctgtcttctaggaacccgtgggcttttactgtgcatgtctctgtacaaagtgtacctctggaagctgccaagtgataacactgctttcttatacactgggatcattgtcacttgaaaaaaaaaacattattgtggttgtgggagaaagctctagatctgtgccataatagatatgcattgcaattgtatgccatgtctccattttaaatttgagtttccctttcgtttttactcaccaccaaagaatctcaaatgtaaaattttatattgggtttgaaccactgacgtgtccattctgatatatgcagtcattttgaatttggtctgtgccttctctggatccctccctagcctgtgccccgagccgtccatagagagtttgtaggtatttccagggatggagaagatctaagcatttgacttccccatcagtacatttgttcatttgctttctctgtgaaacgccatgattgtctaaacaagtctcccctctgccctgatccctttgtaccaagtcaatggccacttgaaagttctgtggactcccttgtggcctcaacccgttcgtccttcagcctgtcatccttcaggcaccgacgcccaacctgccgtgacctgtgctgtatgaacaacctcactgaggatttcctcccggcagaaaagcagcaagctctgcaaatatcccaaagttatgcctctgaacacatgtcttctatatgcaagttttgtgaaacctgcctccttcccgtgcaatgtgtccctcctcacaagtgcttagtttctgttaactagaagtatcattcttgggtggaaataggtctccgtttacctgagctgagggttgtttggaaaataagagccaatttttcttagaatatatatgtatattaaatgagcatttgacctgtagatacatagtgtgccgtttggccagagctcctggtgtcaaatgctgggaacaggagtcttcttacaaattatttttctcctctttcctctcgccctctctttcactattttccccccagactggaatttcctcagctttatcttgtcttgctttgaagttttgctcaatgttcctcccttccgaccacttccacttaaataaagtctttaagtagctgaaggattaacagtctggtgggaggcaagccattgaactgaaccacgaggaaagtatattttcttcttttcttttcctgccaagttttcggtggcatttgtagaagctggtgtgaaaggctaggaggcattgttttctattattcctcggtgaagccttttcccagagcatatgtctccggcaggcagtgtgggttcttgccaagcatcagaaccagtctccagggcctcccgacgccgatccatagtactgtacagacccaccgccacccttctcctcggaagatgcactgtgctgtttgaaaacatgtagccgtttaaggctagagtattttatataaatagaagagcttaggtcctgaagaccaaggcagatagatgcagctatgtgtacattgtatatttttgtgaacttctcaagcacgcactcccgtttccctctgctttgcagaggttttgatgtatccctgccgtctgcaagagtccagaggctggactgacagtaggaagtagaaataagctatgtgtagtcttggaaagttcccacctcacagggaatgaaacctagggaacaccaggtactcggcgccctgtggactgtgtggaaactgatttttcttttttctatactgaataccctttgagatttgtgtgggacatgggtccatgtgggtttagtgacagagaagagttcctccaaggactcttggagaggggccacatctgaggagacaggtgagaagtctccatcactgcttggtgcctggcaagctggagaggtcagcctgctgccaggcaactggctgtctttgggaggggtggctcttaagactctacctctgattgcatcactaggactaactacaagctggctggggatactcccttgtgtgttctgtcctatccagatggcctgctagattgaattatactcaccaacacatagaacaggccctttagaaggcactaggtgtttggaggtgagctaggaagaccagtggtatgttgagccccttacagataagcaccggtgtctctttggtgcaccttgccttcagatgctcctggtggtcagctcaactagcaagaccctagtcccctgttccaaagccatctcatatgttagttctctgtcccatgaagagggccgtggtgagttcccgagaattgtctctctttcagcagagaggtgagggactcagacatatatctaagttgaatagcatccccatcgcagctgtaagaattgagctgcagaaggtaccctctgtcgggattgtatctcgacatccctgtcgcgtttttcttagctggagtgtgtgctgcctttcaggtacaacttttatgtaataaaagccagagcattaagcttacacagactactttctatgcaagacagagatatggactaggttacaggaaacgtgcaccgttggctccacagacaagaagtgcattgccagaagagcatcactgaacggagcggagggaggaccagttgcatgtgtttctgcccactcattttgagcagccatattataaaatggatcatcagagctgagtgacaacacgagagtggtactggtttcatgtgcgaggacttccatggactgaacatggatgccggagcagagcatcaattccttcatagattccaagtcactcctcgatgaagactcttgttgagacttactaaacactttaggcgcagtcgggaggatctgcagcaaaataaaggcctgttctgctcttatttaacatgaagcactgtgtacttgtttcttctctccaaagtaaaattagattatttataacttcgatcgcctcggctaggtttccaagtcactgatttctgctgaagattttactacgttgttgcacaattttaagataatttttttttttggtcttggtgtcaacctttttcactgaataaaaatttaactgggttaaaaaagaaaaacaatgaaaaaaaataaagacaccgccatcacctatttaaat

SEQ ID NO: 34754 - DNA, 1187 bp, Mus musculus
gtgagtacattgtaagtactgtctggacattggtgtgggtgtcagagagcctcaggtcactagggtgtgatttgacgctgtggagaatgaccccatctgccaggttgctgcccatcgttcttgcctccttttcctatcgctgtgatgacatatcctgacaaagcaacttaagtggcaaaggtttactcactgttcaagaatatagtccacagtggcagggagttcagggacctaagagctgaaatagctgggccctctgcatctgtagttgggaagcagcagtgggtgcctgtgctcagttcactttctccatatgtacagtccggcatccagtccaagaaaaggatgcgctagctacaccccacttattctaatcaagataaacacctgcagggatgttcacagtgtcctctcccaggggagtctagatcctctcaagttgccaattaacactagcagcgccctaccttccccttccccgtgtgagcctttacaaggcattagcaggccggatctctgattacctcttccctatgctgatacttctccctgtaggtggaatacagcaggagtgggtccaagatgtgggcctcccagagagctgctagcaactctacagaaataaagaacttactgctcaatgccctctacactgtcagagtgagtgtccacgttccctccagccactggccagtcccaaagcacagggaggtggctccctttgtcaggtctctgcttacggtcaagagatgagtcttggtgttcttcacaatacctagttcgtccagcttccctctgagagaacgaggagcttgtggtaatgtagccctccctgcttctaaccagacactgttgcctctggggtctgtacttttgtatacaccctgtttttccttatcattagctatgggcaatacggtgctgagtggcagttataaaccaattttgtgaggttcctatgacacccagtataagtatatttagcaggaaggagataggttttatgtaaagggtatttactcaagccattaagacaccctccacgccctctcccggagattcctcgtactgagtctctctaggactcctttcatatgggtgtacatatgccttaaagatctcactcacacatgcacatacacacaaacacactcacacatacacacacacacatacagacatacaca

SEQ ID NO: 34755 - DNA, 1179 bp, Mus musculus
tgtatcaatcatgaatccaacaacaacaacaacaacaacaacaacaacaacaacaacaacaacaactggcccacagattttctccaggccagtctgataaaggcagttccttaattgaagtttctccttctgaggtgactctagtttgtgtcattgtcaaaaactaagtagcacatacaatagatagatttcaaactattttggatacaatattctgggggcattgcagtaggtatattctattgtataatactacatatcacttcctctgccaattagcatttagattagcatgcatatatgtggatctctttgtatagtattggaataatgtgattataggcagacttcagtaggtgaatttttgagtcaagttcaactacatttctgaatgaatctcaaatatagatggtagtaataatgagtgactgcatgtcaaatatagacaggcagtagtgataatgatggctttgagaggttacttacctctgagacgtagaatcaaggctggcctgtgtcgttctgatgagattgtgtggtccctgtattgaccagggtgatgttctggactgactggggggacctgaagcctgggatttaccggagctacatggacggctctgctgcctaccgccttgtgtcagaggacgtgaagtggcccaatggcatctctgtggacagccagtggatctactggacggatgcttacctggactgtatcgagcgcatcactttcagtggccagcagcgttcagtcatccttgacagcctcccacacccctatgccatcgctgtctttaaggcgagtcctcacgcgcagtctgccagagacggggaagcacgtggctaggcggagagctgaggcctgttgggctgttgcagttggccagaggccttaaaaacgccgtgccttcaaatctgcacagacttgtttgcatccttcatggagagatgtaggcttctaccactgcttacgtttcaaaaggttggaggttgaggtctcctcctctgagtgaatctctttccttttcagggcctgtggccttgtttcagtttcgcatcttcatcccttgcttctctccctgctgactgatgctgtgtgccatctatataaccttccagtcgttctcaccctagggagcaaatgcatctacctagaatggagaaacatatttcaaa

SEQ ID NO: 34756 - DNA, 1201 bp, Mus musculus
aaatgataaaaagcacacacaccatacatacttcacaacccacacatatacatataataaataagtaaataaatgaataaatttaaaatacacagcctctgaaaccaaacaaattataaaaagcacacacacacacacacacacacacacacacacatgcacacacagtgcacaaatcaaaaataaacagtccccctcccacccccatccccccaaatggctcaaattttatgattcagaagttgatgatgtgaaatgtgactcgcaccttcacagctttcccagaggtgctgtgttacagggctgctgccttcctccttatggctgctgcccaccctcgggttactagagatgggcagttttgagctcttgttcttgctggatggctacagaggcaccggaagtggagggttatgttgaaggtggggagacaggaacccctgccccggcctggatctgatacattgctctgcccttttctgttcacaggggttccttgcacagaaaacgactacaagctgtggtccccatctgatgagcgaggaaatgagtgtttgctaggacacaagacagttttcaaaaggaggacccctcatgccacgtgctttaatggggaagactttgaccggccagtggttgtgtccaactgctcctgcacccgggaggactacgaatggtttgttcttctttcatgcccaggaccttgaactacatcacatctgctctgtagtgtgaggctgaaagatggagaacatgttctctttctccgaggaaggaaataagcattccttgagcatgccacatgatccaggactgcgtgaggcgctctctgctcatgtcatcttctaggtctagccatgaagttcagcagacagagatgcagccggttctataggaacctcctagctcagggtttagttctaggaggacccttaaagggatcacaccgaaagctccatttgggggaacttgttttctatagttgcactctccctttggggagacaggaaaccctgcatgggcctggatctgtgcctctcgttcatgtgagaggacttttaaaaaaaaaaatctgaaatgaggttatgctcatatgtacaatatttgtatcatttattattccatgagaaaactatccaaggtgtgtctgggaattaagtggaagtaacacctgcacagatccccgtgacaggagatgaga

SEQ ID NO: 34757 - DNA, 1048 bp, Mus musculus
ttttaatgaagggaataattgccaagtacttaaatctacctgaggtacacttttaaacctcatcttctatttcttccctctcttctgcaaatgaacaaaacaaaacataaaggtggttgttgtaagctaagtatatttgtggagggagaagatatgtttttataaagttattctaatggctatttgtgcaaaaaaaaaaaacaccaataaaagttgatcataactgctattatccacttaaatgttatagcacaaaacgtcctttgtgcattggggtcactttgaaggcgtagaggtgatgtgggttataaaatctgacagcatcccagatgctcagagtcacactgcactgtgtgcaaacatcactcattgcaaccgtctctttctcatttgttagttgactttaccaagtgctctaaggaagtggaaaccagaaggaacgaagctctgtgttaggatctaggcttcccatttcttgggtacaacccactagaaccctggggtttgaatacatcagcatcactaagacatggactgattaggatgttggatgaatctggcacctagctcttagcagtgtgctgtgcatacaaaaggatccttaagatacactgtttggtactacatcaaggaacggtaaaccccatcccaccaccaccaccaaatgggacatctccatcatccctaacccccgaaggaagaggaggcagagagattgagagcagagaccagggaagatgctgcaagtctctagacatgagggggcctttgtgctcgtaagctcactatagctgtggctgtcgatatatgaaccagccagtcagcattccagagtggttggggtcatggatggggtgtgggggttgagagggtcccacctccagctgggagcttttgacagttgatgattgcttgagaagggagagtccgtttgcagtggtgcaatctctaagttgcttttgcaccactgggttacctcccaggccaaggcctgttctgattggactctggcttataaagtaaaagaagataggaaaattggagaggg

SEQ ID NO: 34758 - DNA, 3266 bp, Mus musculus
tcctagggagggatgggggtcctcctagggagggccttctctggctcttccttccctgcccctcctcctcctcctttccatttgggggtcctgggtctggttttcattctgacttgtacccacttacctggtagttttactctgttcataatttaacttggttttgttgttggtgtgtctgtttttccccctctcgttcccagttttaagtgactttgagtattttaagcatttccagtctgattctgatctcaggaactcggttaggttttagagagaagtaggcggagtgttagccctgggaaactcgctactcccctggaagcctgcgctgggcattctaaccgctccagcacctctgcgccccaggagcccctccagggtagatcagctgtcactcccgtcacctggcactcgtcctgttctaggggttttttcttcatgttcaatgaatgtacttcctgacagctttatcgcataagctattggaaatgaaggaagagttgtagatactcactccttagcagaacatgggctgagaagctggccaggagtgtgaagcaagtggtgggactggggagaaagcttgcaggctttccacctgtgcggcatccttgtgaaggaagcggcgctctcggctctctaacgggagagatttaatcacagggagctgaggcccacctttttcttgggactttgtgatgatgcgtctgaacaactctttttgttttgtattttatgtcccccgtggaatgatttttgcctaatctgtgagtgaactttcagtgtcacccccccaggtgttttttgcaggggtgtgtgtgtataaagcacttgacctttgacacagcccctcacctactctcctattctgaaatctttttctttggccttccattctttgttaatctggatggtttccttgctgtttctatttagttctgttctagttcttgttttgttctggcttttaacatttgatatgtgattccccccctcctccaaacttactgtggagtaaacgctttaggtgacccatgtgacctcttcacggatgggaggtgtagtctttaagttccctcctccgccatgtggcaggtgtttgctctcttgccaccgcacttcaggttcagcatctctaaggctgctgccccgggcctcctgaggcaggcccgaattcactgcagcactaagggtgaaagccaaagggtttagaaagatgaatgaagccgggtctcctgctgcagactttgtctcagaatcctaaaaaaagaaaaagaaaaaagaaaagaaaaatgagcagcggggatcaggccagtatagacgaggacagttattttgcaattgcattttcttgacagagttttggaaatagaaaaaaaaaaagagtatggcagccgtgtcccgaggatgaagattggttgctttgtgtatgtgcgtgcgagtgcggaggaatttgcaagagaaactgtaatggagacgttgctttgtcagcctgggaaacagttgcactcttatttttgaactttggagccactgttgtcccagggcagaaggcagagtgagcgcttacactttggtcacaatgagatattttctatatgacagagttctctgagaggcttttttacgctttgaaactcgtatcttctgttattactcaacagtgtttctctgctgcaggcctaatcctttattacagctgcgtggaaaaggagtctcatccaacccaaccggcgtgggtgtttccagagcattgtcattggcggtttgaataattgccgaatcttttccaattaagaaaatcttaagtacagtccttggccttttagaattaacagcagtaaatgaggaagccgtttgcgcatgcgtctttccagattcacttgggtggctgaggaaagaagctggttttgaaataaaatcggtgctgtgtagacatttataaccaaaattatttttataacagacccagaaggaggagagaaaagaccgtggacctttgagcctgcatgttatccgtcgtgcttgtttgtatgtaacattgatttcatcagattgagtggaagcatatggttggcagttaggaggcgaaaagctgccctcgctggtatacagagcgcgccttgggcacggcagggagaacatgcctttctaaagcagaaagtcttttcggttgtggggaaggaaaggagtaacacgagaaagccaaacctaagcccagggtcctcctgtgggcagagctgctgaagctgtgctccagagggatctcttagtttgggttgttgagataccctggattgttttaaatcgggggagtccacagttgcctgtgtctgcagcccattgccataaatgcacaagacagcagcagagctgaacgccccttgttcttagagaccctctggtgaaaatgaagccacgtagccgagggctgcagtgctaccccgagaaaaagaaggagctgtgtgagggaacgaagagcagatgcagttccaactgggattttcagcaatgtcaccctaccggccctgctgggagcagagaacacttggttgtgcagtattggtcaccacgggagccttgccaccaatagcttttcctaacacatgtgagtgtggctctccctccgcactgtagcttaggccctgggcaagtagggcgtgactccagaatgctctgtagtttgtatgtacgataatttctgtttatgaatttcacttttcctttcatttcatgtaaaactaaaatgcaaacaatctgctttcaagaatgcccagaagctctgtgtccccaactgttgttgtgaactctaccatttctcataggtgcttccttaaaatgtatgtttattctagtgaccgagaggggactggactctcaggccctttacagttgtctcctgcagttaatggaaatataaatatatatatatattttattttagaatataatttaaacatgaaggtctattctttgcactttttattaatatatatagagagagaatctttaaaaaaattaaaaatacaagtccatttactccttgtgttctgagtgtttcttccggagcagcgggtcaaagatatgtggtgggttttatacagctaaagatgaacattgattctgggggtgccttcttggtgagattggcctaagctagtaacagaatggcttgccaaaggtaattggaatttcactgaggttgaaaaatctcaattaaaatttttctttaaaaaaaaagattttatctgttagcaaaagtt

SEQ ID NO: 34759 - DNA, 1185 bp, Mus musculus
gctttcttttcttgaagatgcttttattatgttgataatcacggcattgtcatttagtccataggcttgaatcaaattaggaaaaatttcaatttctactttttgaaaacaagtctaaattatttaatccttattgtagtaactcagtgagattatatctttcatgatcatctttaataatttaaggcctaaattttataaaggcaagtaccctttgtgaaaggatatctttcatttgtttagtaatgtgtgtcctcatgaaacttaataatgattacaagaaataaaaaatggagatttatccttcacagatctaatctcttctaagtgcatttttagactcacctattttatccttcaggggaggtggcagaaggttgtccagctgacaaggaacggcattataaccgtcagacagtttactgtttggtctcactacttggcagcagtcagcatagtcctgggccctaagtagccagatcgaatctactgtgcagtaattttataagtaagccatgcagcccagtacactcacttctgtggtcactcagagttgatggtaggtagtggtcgggtagtagatggactgggcactggcatctcagtgctaactgctccatgcgtcctccagcagttcccggagctctgcagcttgactgcagccacagggatggtagactctcatcatcagctacaagcagcgtagttctggagtcagcacactctgccatcagcagcagtgctgtggcgggggactggaaggagctgctgactgtttccatgtgtaaacttggccatactttgtccgggctgttgtaacacgtggcgacccctggttatcagagtgctttgttatctccggaaggctgctgggtgataggtttagcgtctgttcctaatgagaccgggccttctcatggcagctcagagataataatgagagaggctgtaggcagttgggtaatgaccttaaacttgtgtgcttacagctacaagaaaatgtgtattagcaacctgttcagaggggtgacctctgcattgctgtgggaagacagaggagtgttcctcccttggtgactcaccaggcagggctaccgttttgtgttcaggtttggcgactttgatgtagttacagtaagaattttggctacaatcagttcatacattttagcaaggtctacttct

SEQ ID NO: 34760 - DNA, 1172 bp, Mus musculus
tctggtgctgcttcctgcttggctcttgatggtggcctgtagcccacactccctgaggattggtaagtacgggctggctctggatgatagtctcgtcgctaccctaagtgtacacagaggagatgtctatacttcataggctctgtgggatgcttccctgacctccctgagtatggctgtgacagacatggaggtggtggaggcagaggcagatacagatgtgaatgtggaggtgatgagggggcctgtgctgacagctcccatctgtccttcctgccagactccactagtgtctagaataaaatgatgctcactccccggtaggattcatgacaggttcagtcctgaatgtgaagctgttagtaatggcggaacatgaaaaaggctgtagggattccaaatccaggactggagataagcagttggttacctctttcttctgattagttaaagaagaatctagaacttggtgttaaggttgtatttggcaatttggatgaagtcaggagtctgcttggtgattctagtccagcctgctggcaagggtcttgagttgctatctgctagccatggtgtagctctgaaatggaagacaaggcacctcagcctcttctttgtcctcattgctgagaacaagcagggttaccacctacacccctggcacctctactcctggcagtcaggatggaggcaaaccatgtgcctcctccctgccatgagtaaagctcagaccactggaaaccaagactctagatcttgggacctggtggtagagatgaggacaccatctactctagcacaaggaatccttggagtcaggacaggtgggagggtggtagaggtcagacatatgtagatgtgtatgtgggacatgggttaagtgtggcatcagatatccaaattcttgtgggctgaacagaagtctcctgagaccaggacctccagtgttaggttagatgattgttcttgtgggcggttatatgcagataactgtgagtccttcttccctgactgaaggtgggtggagtagagtcgctgtggtcatgactttttttttttttttcttttgagataaagcttcactgtataaacctgtttggtctggaactcactacgtagactcggctggccttgaagtgatatagatctgcctgattctgcctcctaaatgc

SEQ ID NO: 34761 - DNA, 1214 bp, Mus musculus
tgaagtttctttgctttaaagctacattaaattaaataattgaaggttatcttcccaacatttccattattatttaatagtcatatgcccatatacagcagggaaaatgtaagagggtagaaattgtttacaacccagcacttacactgttgtcaatggtaacagtaaccgacatgtatggagtagtcgccatgcaggatgcatgactcttacgtgctttgaagcactgtggagtgactatgtcttatttatagctttcttttaataaaaaagattttatgttattttacatgtatacgtgtgtcccagagtgtatgcatgcacaccatgtgcatgaaggtgccctcagatgtagaagagggtgttggctccctggccctgaagtcacagacacctgttgtttgctgtcgtgtgggtgctgggagccgaacctgggttttctgcaagagtatcaggggcccttaaccatggaaccacctctcgagccaggatattttgagttgtaagagttcacatattcataatgcataatgtctcatcttggggatcagacctaagcctgagcatgagactcgtgtcagacgtacaacttagaggctgcaaagagcttcgtgccatatgttcttgcctctgtgttctgactgtcacctgccaggtgggacattttgtcactggtggcaccatactgatgctccaaagtttttgactttggagcatttcaggtgtttggattcgagatgctaaacgtaatcacttcttttcatgtgcaagggaaaccgagaagtcacatgaatttctgaagaacaagcaggtaagaagaggacgaggttttactgagcacttgggaggatgttctctgagtctcacctactggggaccctgggaatcttggttgcaattgtgaggtagaactcacagctttcaggaactcctggatcacaactccccccaaaggcctcgaactcaggcattgtgaaggctgagactacttctgagactcaagaagggagtcgaagggcttcctttgtgttactgcaatgctgtgtcaccttgggtatcctcgatgccagtgaccaagatttcttggtctttgtggtttggccttcaggcatggtggccatgcttcctagcagggacagtttggggctgcatcctataggggaccccatgtgtaggggagccaggacccttatcaggtcttgtgatttcgttgg

SEQ ID NO: 34762 - DNA, 1225 bp, Mus musculus
tacagagatatttacatgcttgtgtttactgaatgcttggtcactcaaagtgaccaagatattgattattagtggatgaatggcgtcaaaagaatgccacatatacatgtgatgggataccattcagccgtaacgacaaacatcctgaatatctggtgacatgggtgaatcagagggcactatgctaagtaaaatatgccaagaaaaacaattgctttctggtgtgcagtctgaaatagccagctcccaaggcagagccagagaggagagtggaaggatgggtggtctggatgggggaggaataagggtgttagtctaagagtacaaagtttgagctactcattgttctatcaagctcctatgtttcctggtgcctgtggcttatgctgctggtatcaggcagggttctctagaggaacaaaccccaaagaatgtaatattattagcacattgaagaggcagagagaacagtagttacatagtctacaagctgaatgcttcaggaatctcggacatggagctcacagaagtcacttgctttgagtctaattggaaggatgaagatgctgagcctagatggcagcagaggatgacagcagccgtagtagatgcacttgctccggaaggaggaaaggcaggcaggcaaactgcctttgttcctgagacattttggaaggtactatgcacactgggggcaggtcttccctacttgagttaaacaccttgaaatgccctcgtagatatggccagaggtgtgtctcttagctgattctaaatcccatcggctctatgatcaggaccaacgacccttagaaatgtaaagaaagtagatcttatgttgtgcttttgtcccataaacaatgacgaggggaggcaacagatgtgaccatagacaggtgatggtttaaacaataagtgtgaatcataaaacttaccatttcttcggctgtatgaactaaataaacccatcctttagagacatggtcttatgatgtgtcgcccagaactgtaagtttgcaattctcatatctcagcttttgagttctaggataacaggcagaaaccaaatatgtgcagctttttatatgacaatcaaaccttggtaacatggttagaaatactcattttgaacttgaggattgcagctcagctgtaaatgggggatctatccttccagttcccttcccatttgggaatagttctgtgggcttggagcaggctaagt

SEQ ID NO: 34763 - DNA, 1161 bp, Mus musculus
cccaaacaacttctaatgacctctagaaagaacaagcccttttttagaaagtattttgtttcattgtcttttggggagtgaagaagagaaaagtccttgttgccagaattttagaagctaaaagactttatgctgcctctactgcaggggctcgttttcccgtcgctcctgggcactggcgctggcctgctgcctgcagctggtaccctgcccaagctgtcttctctgcagccgcctgcttgagcttgctctgtgcctgcttccctccacgctccgaaaaccatgatctacaaaaacagacttctgcaaggtctcgctcgcctgcccacccgccccctaacgttgtgttggttttggtttttgtttttgtttttgacagttcacccccatttagtgtgagctgtaaaactgtactttatttaaaggcgtgctcttgttcccgtctggctgccttccccatgggtgctgagggtttgggtaatacactgatcaggaaaaggtggtcttctcagaaaccagtccctccctcccagccattgccaggtgccacccgctaagcagacatactacagcaggggaccgtagcgtgcacactgttggtggtttttaatgagcctctctttccccactaggctgtctcactttacttgttcaccatacaatcatttactctttaacaaaaattgcttttaagagaaatctggaactatctttaaaaaaaaaaccttattaataatcatgtatttttactgatcacattttgaaatgcctaaaagacttttattgctctaattatccagatgcacctttgtaaaaagctcttttatgaattagctgataaggctgtatgtttctggaacaaaatattgggtcatctaaaactttctgttttctggggtctgggaaaatagaaaataagaattcaaatattaaataagcttaaaagaactgagtatgtgactttttctttgtatgtattcctgtttgtcttctgtaagttgtgttttgacatggggttctcaccttaggctggccttgtgctcctccgtgagtgctgaggtcttaggtgaccccaccacagccggccaccaagttcttaagtggacaaggagtcagtagcctccctagcagtgactctcctggccttcctgctgcttccgg

SEQ ID NO: 34764 - DNA, 1424 bp, Mus musculus
gaagaccagagagcagcaatgcaccatactcttgatttcatggggagaaagggggatggacccccaggccaggaggtgtaactcctagctgcacctgtttccatatgaccaagagtaatcatccgggaatgagagagtctataaagaacactcattgctgctgcaggtgagccagacatggccaggtgacaccagccatgtctctgatttcagtcaactcttttcatttgtttcctgaatagcaaacacttccttgaaactcttctcaaacttggactccagtctaagtcccatttcgccaaacttagggtccttgaacgtgattttgtgattccggaagatgagcctcatgtcttgcacaaagtcttctacttggcagtaagcctggtcactcagctttttcttgattatgttcaaccacataggctcttgcacacccacagtcatctctctaaaataataataatatggcatcttggaaaaaaaggagctctcagaacagcaatagactctcaagagaacatactcgcacttcaactgttcctggggagccatctccctctgcagtatctcagattctggaagactcggttgacttcctaaggactgcatcctacagaagatgcaactccatggtgttatctcagcttccactgttgggatatgacagtcctcatggaaggctctggaacaagtatcacagcagaagagtattcctccatcccggcacacctcacattcatctgagttctgaatactagggtcagctggggaacgatgcaagttctgtgttctctgctcttttcttttgcgatgtatccgtggaggattgggtagaaattttctctggatcaggagtttgaggggccaattatggcagcgcaggctcagtttccagttctttgactttccatagcctcccatcatttcaaattccgagggtgtgaaccagtttccattctgacactgtatggacttcacagatatcccttgtttgaatttatccttgtgtaacactcccttcaagttaccacacgtcacgggaagcaactcagcactaaaatcggcattttcttttctgcgtcttcttagacccctgatcttagcagtgcgtcctgggttctttttcattttctttctcttgaaagctgcctggacaacagctattctgccacgttttctctgtacactcattggctttctccattttggttttgaccagttgtggcctttcttttttcttctctgcttcttgggttttcttgcaggaatgttcctcctggtgcccacacattctccttggctgcttcccatccttgcttccaggtcttctggcacatatgttggggaacacatgacacaggaacacttcttttcacgtgtgggttgctgtgctcctgggccaaaattgtgggtgtacatag

SEQ ID NO: 34765 - DNA, 1205 bp, Mus musculus
cttgcgagtgagtgtcgtgttcttgtcgggaagatatgagcagttcttcacttgaatgccgtgaagtttgggcatcttctggagctcaaggattgtttcttttctttttccttttttcatagaggagacaatgatgaagaagaaccagccaagttaaaagtggagcaccatgatctttcagtcgctggtctgcaaagtccaggtaagccgcatagacaagtgtgtcggatgtaagatgttacctattacaacgaaccatgcgtgtcagcagatgctacctctgagccttccgtgtgccagcgcagcactgctctgtgctgtgttttccccagtgcatgatctctgtagcttatgtgacttatctctgcccccaacataagtgttctatgttgaaaaggaaacgtctgtttaggtgtaacctaccttttctgctccactgaacagacagagttttgggattagaatctcccttaatttcgtcaaagcctcagtctcattcactgaatacccctggcaaatcagcggcagaacatctctttgtgaccgcaacacagtttgcaaaggaacagcatgcaaatggggcactcaaggaaggtgatggcgggtatccagtcacaatcccaggtccacacttgcctgtgtcagaggagcggtgggcattggacgcactgagaaattgtaagtttttttcataacttgtggagatactaagtcccagagtcgtatgatgtgttggaaagcctttaagggaaaaagcaatgccttgtggaaaatacacaaaagtctaaccaatgattttttttccaagaaatttatggtctagttgggaagataataggaccccactgccacttttaaaagcaaacattctaggaataataaggctctgtgtgtgtgtgtgtgtgtgtgtgtgtgtgagagagagagagagagagagagagagagagagagagagagacagacagacagacagacagacagacagagacagacagacagacagagacagacagatccgagttggcgtggttagagaaaagaagcagcagatagaaggaaaagaagatttgcttgttatttgagaatttattaagatcaaaataaatgtgtagaatagaaccattcagacaaaaatatcagtaggagcaggagagcatgcaggagccacagcatctccaggaacagtgagcagagcaggggcctgt

SEQ ID NO: 34766 - DNA, 1173 bp, Mus musculus
ccatgtagcctttgtttttaagaaagtatctcatgttgtgcatctggccttcaacttggtagttctttttttccttaacatcctaaatgctgggattgtaggattctgtcattgcacctggctttatgggtaaacatttagttttatttttagagtttaaaagctttgttgaagtataattaatgtgtaataagcttgaaatgtttgtgtgtaggggtgtgtgtgaacatgtttgcatgtgtatacatatggctctgaatgcagagaccaacttttgtgtgcctttccttggaagcattccaccttgtgttttaagatagggcctcttagtaggcagacccagggcttgtcaatcaggccaggctggctggctatcaagccctacagatctacctttctttttcttcccagtactgggggcgttccacgcacagtctgccatgcctagctttttatatggatttggggaccaaacttaggtacacatttttctcttttcttttctttcctttccttttcttttcttttctttcttaagatttatttattattatatgtaagtacactgtagctgtcttagacacaccagaatagggcgtcagatctcattttgggtggttgctgggatttgaactcaggacctctggaagagcaatcagtgctcttacctgctaagccatctctccagcccaggtccaaattttcatgtggcaagcacttacctgtctgtgctctctccagccctaagctgtatatattaagttgtacaccttggtagactttgacacctgcatgtgcctggaaaactatcattgcagtcaagaaaataaatacagctgataggttagctctggctgataatcctagcactcaggaggctgaggaaggaagaccatgagttagaggccagcctagggtatgcaatgaaaccctgtctctacctgaatataaacagtcattttcttgtgcttttcttgccatccttccctccatgcccctcacctgtttcatgccacagtgggttactttgtgtgtgtttcattgaaatggtctcaaacagtttgtgatgtcttgtttggcgattttattctctatgtaattcttctgggttttgtctgtgttgtgcctcaatggttcatttctttttcttgctgagcaatatatggatatata

SEQ ID NO: 34767 - DNA, 1134 bp, Mus musculus
ggactaaaggtgtgcgccactgcccagcagagccatgtggtttgctttcaagctggaacaagacagctaagctagaagaagcagacatggcactggggcccctagctgaaagactgggaccacagagagttgtcagttagaaagatttcctttgctgataggaaggaaaataagaccaggcatcaggagacacaggctgtggttccccaccccccaacccccgccccatggcctttctgtgtagctctggctctcctggaactcactttatagacccttggcttcgaactcagagatcttcctgcctctgcctcaaagggctttggatgcccttgtactaacagatccaggaatgaacactcagcaagtgtggagaaggtaagagaccacagcactgacagaacttggtgtgtctggagttagtgcacaagtgttcagctcctatgacgtgttagccacaagcaaaaaacaaattccttttggcttgggcaagtttaaaagcacttgcaagccagatgggagattcctggctgccagcctggccaccaacctgcttaatttgacagggcatcctctggattaagaccctcccgtggctacctggcatgagtctgatttcaggcttgaccttaccgcaagctcaggcagggttagaaccaattatttattaggccgtttcctaatacccagctgttgctctctttcacagttttccctgtgctgacctctactttaaatccagtatcttgaaggatggtctgtgcctgacagacacctccagtcagcccctgttgcgccccttaccacagaagcctttcaggtccctcccagcccaggctaacgtagatgtcctgaatctgaaaacccccacaatgccgtgctgcggtgagtgattctatagaacttctgtttctgtgtctcccccccccccccatccccactagaccccgctcctgtggggcaaggaccaactatgagaccacacaatgcattcccaagtcaggcggtagtgtggtagacagtttgtcctgagttacacgggtgaagcataaaaggatacagagagcattccttttgagtggagtgacttctttagcaggctgagcccgtgggcccaagagtgggaaactgtcc

SEQ ID NO: 34768 - DNA, 3335 bp, Mus musculus
cttgtgtggggaataatggagctgagggttctgctggggtcctgggcagtgtgttttcctggtgagggtggttttatgttttctttttttttttctttctggccccccaaatggagttggcgtagctctcatatacccctctctgttaacgcccagtccgttctgtacacagtgggtgaccccaggtggattctacccacagttcctatatgcctctgccaacatatgcacacatatccatgcacacatccctgggcctatgccaacctctcacgccctgcccaggctgaacactgcccgaggcccaaccctctgctccacctcttacccgttcccagctcaggaagggatcagcccacagaagcattcagagtcagctaggatgaacctcccgcacccacccacccacccccaaagccactctacaatttcagtgtagctccaacctttcctgacaatgtacatgtttctcggatttctccttatctgtcaagtgctagcaacacttgactcttctggaaagtcagggctgggatcccaggaaggaatgcgaggcacagaattattgagacggagaaggctgctttgtggaaactgcaaacacaattgaagggggactgctagcgtctcatatgggaaggctggcctagatgtgtctcgggtctcaaagaaagtgcaggggcaccggggacctgctgcgtatccacagactgacccctgctcactctctcctggtgccagactggcaagatggccgtgtagaagggcctttgcatgcagtctccctctttgaatgggattctggctttgtcagccgttcggggctgggccttcccttgagtgcatggaaaaaggtctccccaccccacctcaccccagccctctgtccccaagctcaaagtgcctcggtttctccatctgtgcccccagattaccctcattctaaatgggcattcccagggcctgcctgtcaggatctcagccaactcagccctaagtgacactcgctgagggatcacaaacattggggagagggaggcagaccattctgtgccctacgggcactgacccaccctgccataggcttcctaagggagccccagcccacaccccactcctccctggtgctgctattgagttcccagtccaagcgccatctctggcaccccttactcagcccaccagctggggctcttctgccaggccctcactgccctagtcccagcccaggccgcccagtagccacgtagcagaagtctgaagccatgccagccctggggcggctctccgtcttggcattggggacactggatggggtgaagtttggggaagaaaattctggggcctttctagccacagggagaaggaagatggaggagctgggctgcttctcccagaagtattagtgtcctttccatgtcacagctcatcctgttcctcataccactctgcccctctccttggtccccctcccccacccccaaggcaggaggcagaaccctgactgccccagagtggtatttctgtccctatggggccataagactgaaagactcaccctcccgagtctctcgcacctttcacggtcatcccctatcccctgtcttgtgatggatcgaggaggccctgggcctggacaaagcacctaagctccctgtacaaacctgcacgcctttccccgaagcaaagcacaatttatagggtccatgcagcaggatctaggatccccagccgtggcactgagcgcttccaggcggccgccacctgggctaagaaaggacaggagtcaggggtcggtagctggacccaaggagaaggggcttttcttgccctgtgtttgcgggacagtggacacagccagctgacagtgtgacagagcggagggcattttgcttcaccttcatgccccccccccccagcacagctgagcttctgccagactgcggagagtaaacttggtgtgttacctgcccagacccctccggatgtcgtccctagctgccctccccctcctgtccctcccctgcccctggacccctgtttccctacagattttggtattgttctggtgtgcaacaaccctctgagtctcttttaccagaaggacctgaaatacagcaacacacaattagtgaacacacgcccagcacaccaacacacgccttccacagaccaagcacaggtgtgtgtgtgtgtgtgtgcacaagtacacacataaacgagaaacctgtattaattaatgctcgggccccaagccctgggaaggcgcaccctctgccagccaccccagcgtgccccagtcactggtgcaataaccttcctgccatcgtccaggtgggagaatcaggactcacgtcaggtgggtgaggccacccctctgagcccagcagacactgcatcctttcctgggaggaggggggtgctcccaggcctctggaggagtccaggtagagacttccccaagcctaactgccaactgaaaccctctcctggtgagggcaggtggctccagctgacctgggccggagacaccgagaggtgaggaaccagcctcgctgatgctgctttctgaccccagctgtgaagagtgggctggggggaagagggtgactttttttttttttaacaaatggaaacaaaatccaggagaagctgccaccctcgcctgagtgtgactaagcttcctttgcttcagtttctatgtcactgttttcctctttggtcctggggacagcccagcagattcccctggtcctgacctggagggggggagtggttgccccgcccccttttacttgtattaaaaaaaaaagatgggttgaaaatgtactgagaaaaaaaatgtacttttttataaataaagtgtttaaaacaagcccaagtgcctcttgtcactgcagtggggtgtgagcaagagaaggagacagacaaccggacagcagggacgacaaaggccagagtatctgattctatgatagggactcattgaggggccacatggccaccttgcgggcttcaatggagctatcccaggagacatgagctgcgcagggcacagggggatggatggctggcatctgctggccagggccaaggcatgggggtgtggggcaagaactggatgacaaaactgcacagctgaggaaggaagggctgctccggctagagtcacaggcagcccctgctccagagctcttatgtcagtcaccacccctccctaggtcgctctcctctcgctcacttccttagaattctgttcctccctgccaggtcccctgtggctctgaggagccccgcagtggagcacctgctgtgttccatccctggagacagaa

SEQ ID NO: 34769 - DNA, 1055 bp, Mus musculus
ccaccactcaggaaatggtggcagcttcgtgagtttgaggccaacccaagaaacatagtgaaaccctgtcagtaaataagtaagcaagtatttgagtatctactatatgctagggctgacctggacattaggggtcatcttctgaacaaactagtgcttgagggaggtatttggggtttttgtttgtttaatggatctgaatgagttccagagactggctacacagcgatatgactgagcttaacacccctaaagcatacagtcagaccaattagacaataaaaggtatgtatagcttaccaaataaaaaaattgtattttcaagagagtgtctgtctgtgtagccctggctgttcttgaactcactctgtagaccaggctggcctggaaatccatctgcctgcctctgcctctctgcctctctgcctctctgcctctctctctgcctctctctgcctctctctgcccctctctgcccctctctgcccctctctgcccctctctgccgccctctgccttctgccctctgccctctggcctctggcctctgccctctgccctctggcctctggcctctgcctctgcctcttgagtgctggaatcaaaggtgtgagctctgtaggtcttaagttccagaagaaagtaatgaagtcacccagcagggaggtgctcagggacagcacagacacacacccaggacataggctcccacttccttggctttctctgagtggcaaaggaccttaggcagtgtcactccctaagagaaggggataaagagaggggctgaggtattcatcatgtgctccgtggatctcaagccctcaaggtaaatggggacccacctgtcctaccagctggctgacctgtagctttccccaccacagaatccaagtcggaactcttggcaccatgaacccagccatcagcgtcgctctcctgctctcaggtactgggcaagggtcagggctggcattctaaggaatctggcttcctcccatcccgggaagtagcctctttgccatagtctcaggggcacaggtggttgggaggtg

SEQ ID NO: 34770 - DNA, 1944 bp, Mus musculus
tgtccaggttagccaggctggggtagccaataaaaaaaaaaaaaaaaaaaaaaaaaaaaacaggcacctccattacccttcccctaactgctggtctcctgggaaactgctgctgtctatgtgagtggggcaagattaggggccagaaagggggagcttgtagtaaaagcacagttgaggaaactaaatgggaaaggcagtacagtggtgattcttgtggtgtggaggttctgttacagcatccggtggagccgctaagatgagaaagcgccagctagctgccttgaacagctgacacctgtctttgcccgcctgagtcctgatctcccctcctcccggcaccccttctctatccacagacaagctggtcaagtgtggcggcataagcctgctggttcagaacacatcctggatgctgctgctgctgctttccctctccctcctccaagccctggacttcatttctctgtgactggttgggcccaaggagaaacaggagccctcgaggtccttcctctgcagaggtcttgcttctcccggtcagctgactccctccccaagtccttcaaatatctcagaacatggggagaaacggggaccttgtccctcctaaggaaccccagtgctgcatgccatcatcccccccaccctcgcccccacccccgccacttctccctccatgcataccactagctgtcattttgtactctgtatttattccagggctgcttctgattatttagtttgttctttccctggagacctgttagaacataagggcgtatggtgggtaggggaggcaggatatcagtccctggggcgagttcctccctgccaaccaagccagatgcctgaaagagatatggatgagggaagttggactgtgcctgtacctggtacagtcatactctgttgaaagaatcatcggggaggggggggggggctcaagatgggagagctctgctgagcctttgtggaccatccaatgaggatgagggcttagattctaccaggtcattctcagccaccacacacaagcgctctgccatcactgaagaagccccctagggctcttgggccagggcacactcagtaaagatgcaggttcagtcagggaatgatggggaaaggggtaggaggtgggggagggatcaccccctcctctaaaacacgagcctgctgtctccaaaggcctctgcctgtagtgagggtggcagaagaagacaaggagccagaactctgactccaggatctaagtccgtgcaggaaggggatcctagaaccatccggttggacccagcttaccaagggagagcctttattcttctttcccttgcccctctgtgccagcccctcttgctgtccctgatcccccagacagcgagagtcttgcaacctgcctcttccaagacctcctaatctcaggggcaggcggtggagtgagatccggcgtgcacactttttggaagatagctttcccaaggatcctctcccccactggcagctctgcctgtcccatcaccatgtataataccaccactgctacagcatctcaccgaggaaagaaaactgcacaataaaaccaagcctctggagtgtgtcctggtgtctgtctcttctgtgtcctggcgtctgtctcttctgtgttcttccaaggtcagaaacaaaaaccacacacttcaacctggatggctcggctgagcacttctgtgtgcagaaggtccaaccagactctggggtaccccggccctccctattcccttgcctcctgtctcccgctttttatagctccctatgctgggcttctctggagagtgaaatctttgcccaaatcaatgcgcattctctctgctgagtcatctggcgacagcagttgagttcacccgccaacacatgggcccagctatgtagccgaaccctggctctggaagtgccagggacttt

SEQ ID NO: 34771 - DNA, 1147 bp, Mus musculus
tctttcagcccatgaggctcccagtacccactgagtaccaccctgaaggatgtcccagctctcctccaccctgaagcgctatacagaatcgtcccgctacacagatgccccctatgccaaaccgggctatggcacctacaccccttcttcctatggggccaacctggccgcctccttcctggagaaggaaaaacttggtttcaagccggtctcccccaccagcttcctcccacggccccgcacctacggcccctcctccattctggactgtgacaggggccgccccctgctgagatctgacatcattgggagtagtaagcggtcagagagccagacccgtggcaatgaaaggccctcgggcagtggactcaacggaggcagtggattttcttatggagtttccagcaactccctcagctacctgcccatgaatgccagagaccagggggtgaccctgagccagaagaaatcgaacagccaatcagacctggcccgggatttctccagcctccggacttcagatggctaccggacttcagatggctaccggacctcagagggctttaggatagaccctggaaacctgggtcgcagccccatgctggcccgcacgcgtaaggagctctgtgccctgcagggcctctaccaagcagccagccgttctgagtacctaacagactatctggagaactatggtcgaaagggcagtgcaccacaggtgctcacgcaagcccctcctccctcccgagtccctgaagtcctcagtcccacctaccgaccaagtggccgttacacactgtgggagaagagcaagggccaggcctctgggcccagccgctccagttctccagggcgagacaccatggtgagtttactcttggggatccagtgagggactggggagacagccccgtgttacaaagagccaggctaggaacagaactcccaacctgactgacgattggtggcggacaagcagcagagatcatcttccacgatgatcaaagcatgacttggtggctccatggctcagagccatggggaaggggctggcccgtgcttcagagacctacacacgtgggaatgatccaaaggtgctctaggaggttcagccccccctgtctgctgttcttctcattctctgatc

SEQ ID NO: 34772 - DNA, 1227 bp, Mus musculus
tgcaatacactccagactcccagcagctgctgttatctgtcatcttcctcacagccagctacttactgctcttcctgaagtctgctgtcccctttcccttcatttctcctggggacacctggccctaccccagcccagggccggagagagttgttttcagaaaggatctcaacgaggtagcaaataccctgagcaaactcagtcgccagaacctgcatccctctggcctagaagcaaggcacagaactgttaggtggtcaggagtgccctaaagccaagctagcatttcatcctgagctctgctcagtacagtaccaccaaccaggagagacctctacggtctcactgccccgagaccatcacttcaccttggccctcttatgctcgcttccaggggttgattgtatcctaaggaagtgagagcaactttttgggtgccttgaaatctgccccatcacaagcttctccataagttctgttctcccaggatggcttctttaaaaaaaaaagtgtggcttcttctcacagtgctgttttctagctctgaactctgtaccatgcacacctctggggaactgagaactctgtgccattcacctggctttctcgggcagtttccttaactcctaagtctgtttgctcttctgtaaaatgaaagcactcatagtttctacttcataaattactgtgaaagagcctgacacatagtagggactcagtaaaggtcggtcatctttgctcctggctttaggagacgagagaggtgcaggccagcctctgccttgagttcacttcaggaaatccatgcctacttggttacaccaggaggcaggcctgggtgtgtgtgtcttccgaggtagggaagggagaggtcacctgaggccgagacagactgcccgtgacctctgagaggcacagtcttaccttttaaccttggatacctatcagctcggacggatttcctcctctataaagtgaacgatggcacctgccctgccctcctcacaggactgccacaaggctcaaaccaagtaatgaaggtggaggcatctccagccaataagacagtaacggccaacctgagcttggagcttcacaggctccattgagcatgtgtaatggaggcaccaccggcatgaagtcggtgaaggtgcaactcggccctggggctctgagggtcaaccccctgaggccccactttccctgaaaatgcagggcgatgagcca

SEQ ID NO: 34773 - DNA, 1099 bp, Mus musculus
atctaaagttactctgctttgaagttgctttttcttttcccctttaatattttgaatggaatctagttgcctccaagaattgtgccttatagcatttggggaccaggggataacttccccttcctgagatatctccctcagctgcttccctttatccccgtgccatgttgaaagccacttggggttgcggggtcctgccctgaacccctggcttgttgtgcacagcagtaaaagagggaagtgggtaaatggtgattcttaagatagtgtatcaagctcttcctaccaccctctcacccaccccggtctccccagctgtttgaaggacagcacaggctccttgcccctcaactcccccctccctttaatttattctctttttgatgcccttatcccccaagcttcctgccacctgtccctttcccagagtctcttagacaaaggccctctggactgagcttctcagggacacccacaccaccccttaccccatcttggcatcagtctttggtcctgtcctgggagtgtgagcctggatggctggggttagcttgtatgattctttgccctgacgttagacaaaaaaaaaaaaaaaaatactccatgctgtcccaagagccaagctattcagcactaaggcatttcgcacagtgcattttgcaccccccacaggtgggcctggcttatgccctcagaacctcgagtgcttgagtgtcccaggacagggcacccaagaaaagacaccctgagtttacctggcctgatacccttctctagggaagacctgtgaacatgagcccaagggctggtgtacacttgtttactatgtaagcaagagtagaatgtctagtgtacagtggagccttgtacagaataaatagtagctttgagaaggaagctggtgtgacggtcttgatttgggaggggcttgtatccgggatgctcccagcaaagtgaggaccacacagttcactgcttttgccataagtgctgcatcctagcttacccacttgttaaacttctcaattattttttgttccttaaatagtacatatttcagatgccatatgccacatctggattcgcaggttgcgtttgt

SEQ ID NO: 34774 - DNA, 1320 bp, Mus musculus
tgccgccgcagcatcctgcaaaccctcaatgtctacctctgaggactccctccctgcctgctcatcctctgcgctccacacaccgggacagcatcaacactttgcctctgggttctggcctgagtcttctttgcccccgaaggcggcgactctgccaagcctcaagccatatatccaggacgtgtagcttggaatactctggaagactccagtctgggtgggacagagtaacactttctctaaatcctgtgtggggccctgagatgctgagggtggtgagtatgtcactatgcaagggccctgagactctgtggtgggctcttgtgctgcgcctgccagggcccacccagatgcctgcctctagggctgtccttctctgcttctggctcttttgttggagtttttggtcctttcccccaggccacgccacgccacgccacatcagtgttgtttgaggattttggaaactcatgggccttagagtgatcttgattctttttctcttttttgttttttcttggtttggatcttgaacctttatgttcagccagagcctctgccctggtaggtctgggagtagaaacttgcagatgcccttctgcctgtcactgtcttttaaagactcccaacttgaccaggacctggagtcaggagtttatccctgagtacaggggtgcagctacacctggctttgggaccattcaccttcaggcaccccagctccatggggagcctcggaaggaacaaccagatgtctactcattccctacatggcatagaacatagcattcctcctgggctctctccggcagtggagagggcatcccgcacttttcacttgggtccaaacgaggggctgggcctcaggggtcatagctccatttagtcggtcggactgcccagtttctatgaataaagttctcttgacagctctaagtgtggtccttgggagtggtcctccagcagccggtcagctggtgttgtctccaggtcttttgagagtagttagaataagaagcgagcaactggatggcgagcttcaggggtggggatgaggcgattgtgcgactggcggtgccaagaggaaagcccacagcaagcatggctgcttagtgcctgcccttctgacctgccttgcagtcagtggttctgagtcgccttctctgtactgcgttataaactcttatgagcagaatgtgaacttgtccctgttcttcctgtgttcctactgtgctaacctttccccgtggacagagcagaatctgctgcctggaggccagtcggccctcccattcctggaggggctggtacttgtctgtg

SEQ ID NO: 34775 - DNA, 1255 bp, Mus musculus
ttcctgctgcttgctttaaggatgttgcagcccatcagcttttgcttcggccttttctgtctggtggtcacgctgtaaaccttgctggctctccatgttctggtgacttctctgtatccattttcagggagagaaatacatcgatctgaggcattagatggctcccattgcactgctcgcagctccctgctcagacttcaccccaagctgaagcctccagagggacagcagggacgagccacactcaaccccccccctgcacatcaggtctgagagctaggagctgggacaggagtcgtctgcaggagctcagttggctacagaggcctggttttagagaccaagccctcctctgtgtccagtaaataatgcttatcccaaggggcccgtctcccagggcatttccccctcccgtgcacagccattggtggcaaatccttctgccatcagctgtgtgggcttgcctctttgagctcatctcccctcacaggctgtcttcatgatgcaggacctgggcacatggtcacattattccgttcacattggtccttgtgagaacctcacagtctggaggcggctgcttttgtaccttcctgcctgctactaattcagggtctcatttggaacatttttcctttgggtagtggtcaggaactggtgtaagtcctccagacacatccctgtgtaaggaagccaggcactgtttctctgagttttgttgttttgttttctttgaaggctactgagcccaagcttcccgcattcccttagtaacaagagacaggacagagagaaggtctactgttcatggggattaggcttataggaatgttagtaccaaatttctacatgtgagctttgggggccaggtcctagagagcccaagtgggagaatggtatttaggagatgaaaaacctggcctagcaagagcttttgaggtgtgtgtgtgtgtgtgtgtatacatatatgtgtgtatatatatatatatatatatggttttgtctgtaaatttgcaaatttttccttttatatgtgtgttagaaaaataaagtgttattgttccaaaagcatgatgctgtgttccattcattatgaagggacagacctggggcttccaaaactataggtgttttcagagagggacaggctcccagaagtctgcccttacctctagagtatccatagctggcagcatgctactaaatgctagctagcgtctctgccccctcctgtgtgccctattcacctgcatca

SEQ ID NO: 34776 - DNA, 9761 bp, Mus musculus
tctagtatccagggctgttcttatacctatgactgcctggtagggcagcagccagaatagctgtcactttggaaattgaagacaactttcaaaacagctgagggaaaagatctaccatcttgttgcccctctaggtagcatctccacccagtccagcttcctgcttcctctttacagtttaagctgttgtcttgttatttgtagaagtagtgagtgtttgaacctattgctaagtataacacccagtgtaggtgttatatgcttttcacagtcacagttgttgttaacagcatgggtgcatggcatatttagaaggtcctttactctgtaataggagtctaaatctaaaacccagaggccaacagcagaatacttaacctatcatgtgtatagccctgggtttagttctagcacctcaggttgataaaacccagacttatgccaggcatggtgtttcatagttgtaatctctgcacttgggagaatgaagcaggagctcagctgtgagtttgagttccatctgggttttagagtgaacccttgtttcaaaatgaacaaaaaacagagccccagtcttgagacagaaaagcacactattagcactattagtaactactgttactgctgttaaatgtgagcttcccaagatttgcacatgttttctttcctttctcttttagacttcaatgagggttcccaagttcctgagcggccccccaaaccattccctcggagaatcaactcagaacgaaaagccagtagctatcaacaaggcggaggtgccactgctaaccctgtggccacagcaccctcaccgcagctctcaagtgagattgaacgcctcatgagtcagggctattcctaccaggacattcagaaagctttggtcattgcccacaacaacattgagatggctaaaaacatcctccgggaatttgtttctatttcttctcctgctcacgtagccacctagcacatctctccctgccacggcttcagaggacccatgagccaggctcttactcaaggaccacctaggaaagcagtggcttcttttgggacgtcacagtaaggtcctgcctttcctgtggggatcgacacatatggttccaagatttcaaagcagtggaatgaaaatggagcagctgatgtgtttcattgttgtattggtcttaagagtgtttttgtagtcctgcagtctccagtaggagagagtgggtttttattaaatggtaacctaccccagaaacagcacaggaagcagtagcagtgctgtgctgtggccctaattaaggacttaaggctttcctgttaagggtgtgtgtctctgttgtctgtgtgtcctgtcattataagattatcctgctgtgtgtgaatccaggcagggagttagcacaagagcttcaggaaggaatctctgaagactcccatctactgtggaattgcacctagccctgctggatactgtaacctcaatcctcccctttggcttagattatcatgtacttagctatgttttatattgttagaacaaccaatgtcctttcccttggaaactccttacttcacctcctcctcattggtgttctgtaggcttgccgtgaccagtcttactgaaaccaagcagcttataggatggtctttctaatgcgtgatggtgttggtttgtttggtagactaagtgggaaggaaagtactgttctgtggctaattgatgctagcacctaacactggtcactccaaagtgctgtttctataggaatgttgaatttgtttttgtttttgttttttaaagaagttttaattctcctagttacctaatgaccgatttgagatagaggccttcatatacattccgtgtcctccccaggacatagcctgtgggagtcggttgccttgatgccaggtgtatgtttctgatgtaggtcatgagtgtttctgcctaacaggaacagaacatttgtttccagggtggctttccaacccaaaaccatagagcttttaggaagcgtcagtcatatatagatttacaaaataaacagctaggacttatctgtttagtctttcttgccagtggctaacttcagcttaggaatttctcccttgaatgggagccaggtaagcctttcagaaatgatttcttcttttgccctgtgaggaacggagctaacaccagtgaggacagcatttgctgatggcttctctagattggtgcacccagtgacttggttgtccatgtgcctagcttgtgctttggaatggtttctctttccttttccttgccttttttattgggtcctagatgtaaccgctgtgtcatccatctacagtatttagttatcattcattggaattctttagctagacggtttggaacagtgtaatagtttgtgtatttacaggttcatcaaggagatgtaatttgttttggagagtccgtttctacgtcatcgtagtgacctcttgggttcagtttgttctctgactggagtcttgctggcttctctgacagcgttgccctttctcctgttgagtacgagctggcttttacatgaatcctctctgttctttaggtccaggcagaaatgacccaccaagaatctgctttctttccagtcttttgcaacaaaaatcttttgaactcttcttttagtttcttgatgcttcaaggtctggattttatcctcttaccttaaggctattcgaaaggcagatacggtatctatggctacccagtgtcttctctacatagcaatgagtagaaaacaatagcttgtcatccacaaaaagtttgtgatatccaattttgtgttcatttgaatactgaaagcctaagccaggcttggtggcatctcagcacctgagagatggtggcaagatgatcaggagttcagcaccagctcaaagctcctgaaaccctgtctcaaaaataacaggggttaaagagatgacttcagttcagagcagctcttcttgcagaggacctaggtttggttcctagcacccacatgaaaggtttctcagatgtataagcaactcacaaccatctataacttcagttcagagcaatctgatgccctcttctggcttctgtgggcaccaggcacacatacgatgtacatatatacaggcaggtagagcattaaataaatacatatgaaaaaattaaaaaatgaaaattaaaggccttaaaagaaaagtagggaaaagctgcaggctctagtctgtttatattggagtgtctttttcccttttagctattgcccagaatctgaagatgtatcaaggaaacagcactggctgcaggccttttgccttctttgtgcatctgtcttgtgtggaggctaaggagatagctcaattggttgagtgtttgtctggcattcacagagccatggttcagcccccactctgcacagaagagtgtgctaaggcacacctctgatccttagcactcgagaggtagagactgcattagaaggtcaaggcactcctggtttaaaactagcccgggctacatgaaaccctgcctccaaaagaaaacaaaaaccaaatctgtggggattactgcccataatacttagggaaatgacagttttgtcctgctgtctgctgaggtgtgagctctggaatgggcgtggatagggtaggtgggtattgagtccctaagctgattgacttgggtgttagtttatcagatgtatacctgcaggtgttaaggttcaaggccattgtgtgtaggcctttcctttgctccaggacacactgaggccgtgcctggtattattagatgtccttaggaaggcttcatgccactcattttggatagtctccaaattttgaatttctttttcctgtgagggcaaatttcctatttttcatcttccatctgtatggcaagtcttaactctttggctcgtcctctgagtttacctaaacctgccttttcgtaaacaagctttattttgagtctcactatttttggcaagctcaccccctttctctgttctgtgttacaattaggaaaacctctttaacgtttctccttttctcatcttcactaacctatttttattcaacacaggcccttgctccctctgtgtccttgtggattgctttacacgccaccttattgatgggtcatcttgccaggactccgggcaaggcttttctagtccagtcccagaactggatgttatagctgtccctcccactgtccttctaaagtgaaaagtttggcttttggattttttttaattggatattttctttatttacatttcagtgaaaagtttttaaaatggttttaaaaacttgtgggttctgaaatatacctctttctaatttacaaactagacagcttttgcgaattgaccctggccggccattcttcatattcttcttactcctcccagccccaccctgcatactctgccattttgtctttctctttctattctcagacatgcctatcactgaactacaatgtatgatagttgtgctggcatggggcagctgagatggatggaaggcactattcttcatagttaaaatatttatttcctctgtaggaaagtaagacatgttttatggtccaagtattcaacttacaagttaatttttgcaacacaccttgcttgcagaccaaaccagggaccagcagtgtattccttttatggaaccattaacaagatctagtctttctgtgttagccatgatgctaatactgaatgttttcctacctcacatcatgagaatcagaaggctactggccttctcagaccttccttctttctgttggcctttctgagtctggaatgatcactccattgaatagagtattccagccagtgtcctggctacagatgtttgagtgattactgtgtgtcagaaatgtcagctatgtgctctttcctgccacctcctggtggttttctgttattgggaagttaagcgtgggctgcccttggctcttttttgcatttgactgtgcacgtgtgcattcagggctctcttatgtagacttatcttcccttacagagctggtccacttaaaactggcccgagactttcccattaaccccatttgtcttcctgtggctttgataatatttgggagattctgttgtgtatacctcatagattatccatgtttgctacaaagtttagtgccatttcttgagtggatgcagagtccactgacttgagttgcacactagagcactaaatgtttaagctgagcttgctgcggtctcctttccagtccagtgccttttctatctttttactgagctgcttctgtccccagtcctccttgctgaaaagattttgttttgcctttctaggactgtcaccatctcccatacagtttagagggtttttttccctgctattcaacaatctaagtaattctgtcttagaaggggtgaaagggttggaaagagcgaagacctcattctcaggctgctcttgtagaagccagtcaggaactgagcctggatcctgtccacataagcctgcccagagcagcactagagggaccagagcttcactgtcaatgttctcctctgacacttgaagtgtcaacatgtagcggaagtactctagcactacacagagcgtcttgatgcaactttgatttcagtccacagacacagtcaatcctataggaatgcatggaagacttggttcttgtatgttagtgggctggacaactttagactttgtccctcctcctacttgacagagtatttatatacatgacaaaatatgttccctagtccttgagttcatgtgatcttatgatgaatgcagttctttagaaaaactcaagaattcctggaaaaaaaataggaaaaaagttaaccctgtatattaattccatgggccagcctggacatcctgaggacaactgtgctgggcctgtgtctcctgaagctatctgcaccaacctagaaatcatggaacaagcctgtcttaacggctctgtagaagtagaaataggagaattatgaattttaggccagcactggatctattacaagctgaagaccagactggactctgtgagcatcttgcctgttcgtgggaatattttctcctcttgtttccagcagcagagaaagcagcggcaccacctggtgaatgcgtggaggtgctctcttcaagtgcacatcactgatggactattcgaatggaggtgctctcttcaagtgcacatcactgatggagtggtttcattacctcttccactgtggtttcctttaagtctgatagtttgaaggtgcagtcttttacggcggagcagtcgtgaggcaggaccatgaggtaactactggccacactgtgcctgcagtcaaggaacagtagtgcctgggtgtattcttaagaaagaaaacactcagcaagaatagcgatttgagggtccatcccccactgaacctatagggagaacagagaaattatggtgaactgggaacttagaagagatatgcaaaggaacttccacaatggaagtacagttgctgttctactcttcgcccctatttttaacttagtcagagtcactgtcacctttgctgctaattacttttcttctccctaggagtcttggcacccaagattgctttcctcactcttgaggccactcttctgtccttgggtggcatttcttagcctccattcaacctcgggtctctttgatgttactcagagtgcagaccatggcttccactgtagctagtaccctttggcttggctctcttctggttttagtgctgaatacctgttcattctgtgggctcttgacctgtcttctgcatccccatcctctttgtcttcctgtaaggggagcctacagtgatatccttagctttactttcctaggtacactgggacatttgctagaatagggatattttcagtgtcgaaaatagcttgttcttgtgtgcttcttataaacaggctacctgtatcttctctggttgctttttctctagtcctgtaataagtgtggtggttttggttttttggtttggttggtttggttttctttcattctttctttttttttaaggtgttggggaagtaaaactgcttctgcttgcctggatcattggaatcccatcctagagcctggcccgagttttaaggcgtatcaaacatactaccctgcttttaacttctaaagagtcaagtcatttggtatatacagaagtaacctactaacccaaagatacacattgaggcacataggaagaagggcaagagcaggtcatcaggttttcaattgatgtctcagctcctgagtgaagcagcagagggatagtagtgccatgtgccttcacagtgccccaggaaatctggcttggctgcaagagaaaggaccagtatttcttggttccagtaagtagcacaagagttgagatggagaactaaggacagggagagccctgcacattgttttgtgcctgctgaagagcactatggggaggggccaggggctgaccaacacctgcttgcagatcttgcagcctcttccctgcttgagaaaaatgtggctgaccactcctgtgttgtccagaacccaggctaagtgccagcctcagatctcccactgatctggctgctgaacaagtcagcaagagttctgctcacctggccctgcattcctgattcagtgctacaaccaaatgtgagaggcaaacctattcctgattcagtgctacaaccaaatgtgagaggcaaaccttcacattgccttgagtttcctttcctctgacccagaatggaggccagtgaagaagattgctcagtgcatgctgtgcacagctcatcagactcacactgcctcaccacatacgccctccagtgggggttgtggagcctgtgttgctcttcccgctacctcttacccagtagtggagagggtggccatgttttggatgtatttaagtggcaagtgaattcgggggcccttctctctctctctctctctctctcgggggcccttctctctctctctctctctctctctctctctctctctctctctctctctctctctctccctccctccctccctccctccctccctccctccctccctccctccctccctccggctttctgggctagtgagcctgccttgcagtgcatgagaggagccgcctcctgacctcctcctcctcggcacccttaagtgggaagtctgacctctgctgagacatgctgggcatggcagctgtgaggtacctcccacatctgctttctggctgtgctgacttgggatttttaaccttatatatctttttcctttattcaaaacaaaacaatttttagcacactgaaaaaaaaaaaagccaaatgttttgtgcctttctaaggcagcgctgtaccccaggctgcatcttaggacttaatatggaaataccagagtctgagctcttctgccttgaatatctttagccctggagttttggggacaaggatgtctggctagagaggtggcacattaggtgcctatagtctcctttctctgccatgaggtttccctggaaaagagcattgttttattctggcagcacgtggttggttccaggcagcagttagtgttcagataactgctctgggtgcccactcacccacctccgagagcagtgccctgcggagcagagttgcggagtgaatgctcctgggaagaggagatgcttcatttgttgtctttttgttttgctggaccttgagccagcttcaacctcctgcctctcctcagacttggctgtcctttcatttgaaggcttcaaccataaagcatgaagtggctggtgcccatcacagggtctgcttgaatccagggaggagccgtggaaccctgaggcctgccggtcatactgtcataggtttcaaccacaagcttttgtaccccctcccccttctctctggttctcccctgcctgtggctaacaaagggggagggaggtggaaacagttctttttaagatctgcctcattcaagatttttaaattcttgatttgggtgggacaagagagaacttggtattttccccagaatagagtcccaatttgtatatcagtgttaaaaaaacaaaacacaaacttaggtgagattctcatggactatttttaaaatgtcattaatataaaagatttctattagtagtatttaacctctgtcctgtagagtagacagaggtaaatactcctgcagagcagcggagctttaagactcgttctctccgacccgtgttgtcttgccagtgtactgatatgtagaggtctgttatactaattagaggtctgttatactaatgttatttattaatttttttcatttccatacagttaactaaagagctttttcaagcacccgtgtctgtaaaaaaaaagtatttttaaataaaatttcttttgttgtagcacacttgagttctggttcacttggggttagggggaattacacagggtagctttgggaccgatcgcagtgatgcaggtgaatagggcacacaggagggggcagagacgctagctagcatttagtagcatgctgccagctatggatactctagaggtaagggcagacttctgggagcctgtccctctctgaaaacacctatagttttggaagccccaggtctgtcccttcataatgaatggaacacagcatcatgcttttggaacaataacactttatttttctaacacacatataaaaggaaaaatttgcaaatttacagaca

SEQ ID NO: 34777 - DNA, 1080 bp, Mus musculus
gggtgggacatggtacctgactttcctccttttctagattttttttaacgatttatttatttaatttatattagtactctatataagagtcttaagaagtcatcacatctcactatagatggttgtgagctaccctgtggttgctgggaattgaacttatgagctctaagagccatctcttcagcccccttttctagctctttttctggattccaaggcatgctgagtacacacattacctctgagctatatcctcatcaactgtactttaacctctggaaactgtatcttctagtaggtaagtatgttaagcactttcagaagtatctgtcactgtcatctgcttcttctgcaggaatcagaaggtcagggctgtcctttttgccgatgtgaaatcaaaggtactgagcccatcgtggtggatccgtttgaccccagaggcagtggcagcctattaaggcaaggagcagaaggtgctccttccccaaattacgacgatgatgatgatgaacgagctgatgattctctcttcatgatgaaggagttggcaggtgccaaggtaagggggcactggagatacagcttggtattagagtgatgtcttgttcagcatttctattactgtgataaaacattgacggaaagcacggtgaggagaaaagggtttttatagcttgtagttcatcatctaggggagtcagggcaggaactcaaggcagtacctggaggtaggaacagatgcacaggtcatagaagagtgctgcatacttcttagcctgtgagagagagagagagagagagagagagagagagagagagagagagagagaggagagagagagaggagagagagagaaaagagggagaggagagggagaagagaagaggttatacggacaaggctggcatgtttttattctcctgaatgctaagatgaaagatgtgtcccaccatacatacctggcctcagcctgcttttgtataggtccacctgcctgaggatcacactcacccacccacaaggggctaggaacttccaaatcaaccaaccaacccaccaggtcatccagccaactagta

SEQ ID NO: 34778 - DNA, 1760 bp, Mus musculus
gctaaaaagaaaacgaaaaggagctagatggtggtggtgcacccttttaatcccagcacttaaaagacatccatgtagatctctatgagttcaaggatagcctggtctattgagagagttccaggatagccagggctacacagaaatcctgtcttggggtgagagtaggggatgatgaggactgtttttttttcttttaaattttgctttgagaggcaggcttcagatcttttggttctcttctctaacccgcttcctggctgctgggattacaagtatgtaccaccatactcagctcctgatttcttactgcaaaaactgcctattacagaagtgtagtggtacacacctaataccagcattcaggagagtccagcagatcccttgaattggaggcaagtctggtctatgttccaggacattcagggctatgcagagagagcctgtctcagaaatagatggcctttgtaaagaaaaaacaaaaggctatatcaatttctattgagtctttgctatagcttaggcagattacgtgtagaagttcgggaagactgcaggaagaggcttcctcctaagcagtaacacaaagaaggcagccctagaaggattgcagtgtttgaagggtttggtgcgatggggataccagggaacccaggagttgggaactagtgtggctgcttctcagaagagcactcaaatatgaaatgaatgaataaactgctcaggactggaataaatgaagagcatggtcctttcatgtagtgtagcaggaaggggtaaagaaatcgtttctagaccatgctgggaattgaactcaggtcctctggaggcaaaacggatgagccaaagggtgttacaagacttcaagttctactgagggaaggtagataaagaaagagactttggttaagaccagccctatagtatttacctaacaaaggcataagttcagtttccagttgtgacagttaatttgccaacttgacgtaatctagagtcacctgcaaagagagtctcattgagggactgtctagatctcgctgacccattgtgagcatgtctgtgtgggattatcttgattgtgttgaggtaagaagatccacccactgtgggtggcactattttctgggcaggcagatccttagtgtagagacagctgaacactggcaggcatgtgtgtatttgttctctgctcttgactgtgatatgtgtcaagttcctgacaccttgactccccagtagtctgtaactttggaattacgagcataataaccctttgtcccttaaagtgcttttagcaggatatttgtcacagcaacagaaaatgaaactaatacacagtaacatgtgtggactggagaggtgacacagtggttaagagcacttgctgttcttccagaggattcaggttcaggtatgagtacccacaggtagctcaaggccatctataactcccagttccaggagatctgatgccctctgctggcctctgtgagcatgaaacgtgcatgtggtacacagacatacatgcaggcaaaacactcatccacataagtaatcctaaaagacaaaaaggctttggtagagaacttggcattcacttcctatcaaaggaactatcatgtaacaggagagaaagacgcggctctaggggccatgaatgtagctcaatggtagaacacttgtttaaatgcttgattaaattattttatgtcagacttgagtgtggtggtgcctttaatcccagtagagctctgact

SEQ ID NO: 34779 - DNA, 1710 bp, Mus musculus
ccactacgccgagcgcgtgggcgcaggcgcgccggtgtacctggcagcggtgctcgagtacctcactgccgagatcctggagctggcgggcaacgcggcccgcgacaacaagaagacgcgcatcatcccgcgccacctgcagctggccatccgcaacgacgaggagctcaacaagctgctgggcggcgtgaccatcgcgcagggcggcgtcctgcccaacatccaggccgtgctgctgcccaagaagagcagcgccaccgtggggcccaaggcgccggcggtcggcaagaaggcctcgcaggcctctcaggagtactgagggggcccgcgccgaggccgcccagccctccccacacctccacaaaggcccttttaagggccaccacctccctcacagaaagagctgagccacttcgggctgcggcggcttgccgcgtccccatcctttctctttccctcctctcccctccccgccctcgcgccactcttccccttaccccgcacggcctccggttctgccacggaggacgcgggcgccgcggcacctgcccatcccggagctcgtgacatcgcttcgccgttctcggttgtggacgacggctccgtgcggagaggctgcggcgccttcccggagtctcggcccctcgctcagacgtccggccgcggtgggcttgaaggttagtccctccgcagctacagccccggcgtctttgcttcagcttggtgcttagccctcgcctggacctttgaaaagtgacttgattgccgggcttagaggaggagaaatggatcacattgtttccttcggtgtcaccgttgctggcctcataccagttgaccctgtcgccattcgtaggccagtgtggtgtggcggggccaaaaatggttgtaatgtgaacccagtttctctaggaatacctcccggcaagggtcagagagacgcttaccggcctgtggacaagagttctatacctgccgcaggcgactggcagccgggcctagccatccatcccctcttccccagcgactcaactacaacccaaacacctagataccagcacaagccggtgaatccctgtctggactgagcctctggcttctgaactggaacttttgcagctattacaagtttagaaccttaagtggggagatttaatgggctaattttattaaaggatcgtttggttttgtttttttaaaaaagtggtttaatgttgaatgctgtagtcccagggctggacatatagctccgtggtagagccatgtgcctggcacatcttgggagagaatgggacttccctttctgcaggccgtgggagtgggaaaggctatgtaatccacgaagatcccgttgactgaagacaggctgtaggaattgaaggctgatttttttttttttttttttttttttttttttttgagaacatgaggcaaatcacagcgtgttttacaacagaaaggtctcagactcaattcaagtttaaaagggctttgggtttattcatatcttccccaactctatcagaagaaccacattctaaactggtttattagtggtattggttacattcaaagattggcatggactttctctaaagagatgaagcccccaactactgagggaaaggcagatatggaggccccaaggtgaggcatatcttccaaagtggaagtctcaacaaccccgtggttcaatttcctgggataatc

SEQ ID NO: 34780 - DNA, 1226 bp, Mus musculus
cgagacagggtttctctgtatagccctggctgtcctggaactcactttgtagaccaggctggccttgaactcagaaatctatctgcctctgcctcccgagtgctgggattaaaggcgtgctctaaccacgcccgactccaaagaagtctttttattttattatttatttatttagttagttagtttttcgagacagggtttctctgtatatccctggctgtcctggaactcactttatagaccagcctagcctccaactcagaaatccggctacctctgcctcccaaattgtgggcttaagggcatgtgtcaccactgcccagcttttttttttttttttttttcatttctaccatttttctagacaggctttttctgtatagcccagcctgtcctggaactctctctgtagaccagatttagccttgaattcatggagatctgtatctgcctccagtgctgggatttaaaggtgtatacaccaccactcaacaaaaacaaaagttttttaaaagttagctagaggggggaaaagagactgtggggcagagggtgcactgggtaggtcttgacttctccttagcaacgctccacagcggggaaacctcaacacccgcctccggaagctggatgagctgcaggaattcagtgccatcgtcctggctgtggctggcctacagcgcatgggctggcagaaccgggtgggccaggtaggagctgccctgttctgcttcccattgaatctgcctctctcctgccttgatttcttcctgaccattctgccaacaacactacaaccagaagcccaggctagggatattgggactcattgctggacttcctacctgtgccttccccaggcttcctagattggcaaaccctagctcactgcctttgaacatcccctatcccaccatcttgtctctctccacagattttgcacccagaagaatgcatgtatgctgtgggtcaggtaggtttgcctggagagaacctggttcataacctttggcacctgctatccatcaaataagatgtttagagagggacaggtttggttgttatgcataagacccagggaagcaggtagaggtgtgtttctcatgcttagctctattactagagaagatcaggcctgttgttctttagggagccctagccgtggaagtccgagccaaggaccaggatatcttggacctagtgagtgtgttgcacgatcctgaaac

SEQ ID NO: 34781 - DNA, 1211 bp, Mus musculus
cattgatttgccttaggaaggcaggagggtgtgggaagcagagaactgacagagaaacctacattctgtcttcccttcagacacattggctgtgatgtctgtagacctgggcagtgaatccatgaaggtggccattgtcaagcctggagtgcccatggagattgtattgaacaagtaagagtagatctgggtcaggggtgtgtttataatttatagtgcccacttcagactgtgatggctgagcccccgtatgagatctggtggcgtctggcttcatagtctgctgcaggcagctgggctaatgctgctttttcttagggaatctcggaggaaaactccagtgactgtgaccttgaaagaaaatgaaaggtttttaggtgatagtgcagccggcatggtgagtaacagccctagccagattcgttccctcagaggctagccttttatctagctggatgaagtagaggcaaggtaaggtaggtttgggcctaagaattggctgggtctcctcctttcaggccatcaagaacccaaaggctacgctccgttatttccagcacctccttggaaaacaggcggataaccctcatgtggccctttaccggtcccgtttcccagaacatgagctaattgttgacccacagaggcagactgtgcgcttccagatcagtccgtgagtgtccagagtgggaaggaagccccttgttggcgcatgtgtccgtggttattgggcttggtgtttgccttcctggacctcacctcctcctcctcccctcaggcagctgcagttctctcccgaggaggtactgggcatggttctgaactactcccgttccttggctgaagattttgctggtgagcatcaaggtggtgctggtggcagtgggacttcccaaatgtacagtgaatagcaagcagagcctctttgatttcttattgaaaattggaccataccggaagacatgtttggttgtcacaagctcgggacgggctcctggcatctagtatgtagaggatagggaggcccggtaagagtcagtggtactgtgttggacatcctggtctgatgtttggggttgctgagatcctgctctttgtccttgtagaacaacccattaaggatgcagtgatcaccgtgccagcctttttcaaccaggctgagcgccgagctgtgctgcaggctgctcggatggctggcctcaaggtgctgc

SEQ ID NO: 34782 - DNA, 2128 bp, Mus musculus
accccagatgtggctcacacatcttctatgtgtaccactggatttgtaggtctcacttgtttagtgactggccttttccttctaaaatgcaggtacggaaccagcagactcggagcctctggaattaggaggtcctggagctggtaagagaggagcctggggcattggcagcttgttagggttggagggaaagaagaggctgttgagccttacactgctattctcctcccctccccctccaacaggacctgaacaggaagagcagtcagcaggacagaagcggccttcaaagaacgatgaactataaccccagctcctgccttccgacttggctccagccccttctcctaccacctctatttattatacatcagggttggagtgggggttggtccctcaggggctcaagttccttctctcagctgggacaggaggtggctgctcagtcctagagtagctctatgggtgaaaccggctctagttctgtccccagccccaccctctggtctcctactctctggccctgtgtttgggaaaaatcactattatgtcttaattctttgcctgtgggtaagtgagagaatggctgccagtagttgttggagacctggtagtgggaaggatgttatgggtcactggaaagtggccagtcttcacagcatcctttcatcttttcctcttccacaaaatcagtgtcctgtttgggccagtgtctacagagcctcagtcccacttggtttctgagtgcctcttttctcttctgtgtcttctcttcccttgtccttcctccttggctcttctgtcctttccttccctgtgcagacaggactatggtcttcttgcccaaagactttcatctggactgtctatagagtaaatatgctctcatggttcatgcgacccctggtggctggagtaagcggggagcaggcaagaagggaaagccctgtagccctgaatgggttgttggacccaggacagtacaggtccggagagtggctggcaaggatgcaagtatactgcaggcactcgacatccttgtcagccccagttcctgtgacacctaccccttcatgctctttcctccttccccctgggctgaccaaaaatgtgctatctactgtgagcccctttcccaagaccctgggggacggagagaccatggagtgaatgtaaaaatgccacctcactctcaggcaagctttgtgggtaaagacgaggggtcagggttcaacttgacagtgtacttcgctaggaaggagaggcccttgcctgctataaccatgcctagagtgcctgtcctccagtattgcacctgtagccggagctagggccaccccagtgcaggggcaaagcaaacctgatgtcagtcgttttgtcttttctaccccaacctcaccctctcaccctactttccaccccccaccccgccttttttttttttttttttttttttttgtgccacattggcagaggggcctataggtccttcactgttccctcctgtgtgttggagttctttagttagcagttcaggctggttggacaggtttgaatcaaattgtactttgttccattgttaattgagaaactgtttcaataaaatattcttttctataggttgtatgtgtttgcttcttccctcccttgtttgtctgtttgttgtgtgttttcacacaggtagtgtatgagtcaggtttcctgaggttggccttggtttcctgaccctcctgcctccacctgtccaatgctgaaattgagataccacatacaggttatttttagagattcattttatttgatttatatgagtacactgtagctgtcttcagacactagaagagggcatcagattccattacaaatggttgtaagccatcactccagtccccaatgcagtttttagatttggaatttggttacattgaaaaaaagtaattgtttgctgtaacaatcatatttaatgtgataagatagaaagttcgaaatccataccagaaaatggcttttcaatgaatctgagaagcccactgccagacttgggtgcacagttcttgtgatccatgtgtgtctcttactgccttatctcgaatctgtactgaaacattaccaggcctttgacccagca

SEQ ID NO: 34783 - DNA, 1189 bp, Mus musculus
caagtttgtggtcctggcagaccctaggcaagctggaatagattctcttctccgaaaaatttatgaaatttactcagactttgccctcaagaatccattctactccttggaaatgcctatcaggtaggtagccccattcaccagattctgccaaagctttgtgctagctcccaagtcatttaaagtgtgaccaagcactgcttttagggaaagacagcagtgaccagctctgtttgtcttgaggacacagggtttccgtaggcttcacgttcttcaagtcattcctaccgattctgcctctacccttgtggtggaagtctcatccctcacagtttcttgtcttctgggtctgacctagatgcgagctgtttgatcaaaacctgaagctagctctagaggtggcagagaaggctggcacttttggacctgggtcataggatgaacctggaatggacgccctaaattctgagacgtgctccagagggctttgctgtgtctactcggtgagggtcctgttgtagcagccttgctaatatacttgaaaatggtagaccactgagcctggtgatggtgacagatcctgggctcgaatgctgtgttctctgcccctctgtatatattacagtcctactctgtatagatttatttatggaggaaactggcttagcaatgctgaaataaacattcctttgttttagtgttttctctcctaactgatcatttgggagaagggcaggggaggggaaggcagaattgctaagggcattcagtgaatataaagtactatcttctagaaaacaagacaaacgatgttcattagacaaactagcaggatagcgactcttgagccttagaggcggcccggccccagagctgctggttctctggggcctgaggtggccgtggtggatgatgggacacttacttacttgcacttgaaatcaagctaaattttatctcagtatgatctctgaccctgcggtgtatgttctgttctaatctcttacagaatttagcacattataaaatacctgtgtttcagagctctcaagccagttacaaatggcctaagtgtggacccatgctttcagagcccccttccttaaacctatttaacctacctgcaacctagtgtaagtgtacagcattagctgcatgccgagcttgtacttaaaagggtccatctgct

SEQ ID NO: 34784 - DNA, 2190 bp, Mus musculus
tattaaaccttattaatgttacgacccttttaagatggttccccttttgaccaccagctgtgaaattactatttgttttttcaagatgggtttctctgaatagccctgactgtcctgaactcactctgtagaccaggctggcctcgaacttagaaatctgcctgcctcggcctcccgagtgctgggattaaaggcatgtgccaccactgcccagctcatgaaattatttttttttttatgaaattatttttgttgttgctacttaatagttttgctactgctatgaactgtaaggcatatgtctggtcttcagggtatctgatagcgactccaaagttgccaatgcaataagccaagaagtctctaatttccctgagatgatcgtgacagagctttctcagatgcttgatgttagggagcaaagggatggttctgactggttctcatttgttttgatgagcagaagtggtccaaaggcaaagttcgggacaagttgaacaatcttgtcctgttcgacaaagcgacatacgacaagctctgtaaggaggttccgaactataagcttattactccagccgtggtctctgagagactgaagattcgcggttccttggccagggcagcccttcaggagctccttagtaaaggtaggtgatgtgcccttgttcttaccagtgcattgtcttgttgggagcagtatgactggaaagacttatgaaggatagactgacttccagagtcttaagttttagtaacttcagtgtcctgcattcctttgcagtccttgaattcctggccctttttatttatttatttattgcttctccgttaattgggattaaagtccagagtaccaccttgccttgttattttggaatgccatctcactttgttgtccgggcaaattattctcctgcctctggtgggattttttttgtttgtttgtttttttgtttttcgagacagggtttcctctgtgtagccctggctgtcctggaactcactctgtagaccaggctggccttgaattaagaaatctgcccgcctctgcctcccgagtgctgggattaaaggcgtgcgccaccacgcccggcttggctatagttttaagtacataaacttagcagataggatctaggtgttgttacaagtataaactatggtccttaacatagaggtggtggccccttaagtctgtgccaaggatgtggaagagtttgtgtagttactcctgtaaccacaacacttccatggcaaaatggacttacccaggagctcaggccaactctgcacggcacccgctgtacagcagcgtgagacatactgcctcaacaggatggaagaaaagactgacttcagatagggtgattctctctacgtgcaaatacactaaattattagtaaatcctaaaaacagctacattgatggctggcttgttggtcttcctgtcctagacagagttgggattaagggtacacgcttgtgagcccagcacactgaaggctaaaagggtcagcaccaaatcccaggccggcttggaagttagagtatgacctggcaccctaagaattaaggagttctgtctggaaaagaaataggaaatgtacacttggtatctgctatatgaggaactctggcatccttggagctggagagatgatttccttctcagataccaaatgcacgtgtgtaaggcaagaaccttcaaacactttgaattttctccttaggacttatcaagctggtttcaaagcacagagcccaagtaatttacaccagaaacacaaagggtggggacgctccagctgctggcgaagatgcatgaacaggtgggaagaaaagtttcttggtgtagaagtatcactcgtgccctttatgagatgttgcggttatgactttgtttttttttgtttgttttacaggttcaatcagctgtacatttggaaaaataaaactttattgaatcaaatgaatgggtgcatctgtttcctaaggcagccggggaggatttggtcttaggaataatagctggaattggtttgttggccatgaagtcagatgcaattgcgcctgggaaccttcagcttttccctttacgtggttgcttgcttcttgttgcagcttcggttttgaattgatgcctgaaagaaaataaaaacttagcaagactaatggtaaatctacaggga

SEQ ID NO: 34785 - DNA, 1224 bp, Mus musculus
agtcacacacaagaaaaaaaaaagattgagaaaaaaaaaaaaaccttcccccctctttcaaatgatcacacccttcattcctctggacccagagacatacagtcctatgcaccctccataagccccacctataaaatgagatcagaccatctaggcttccatttggtgagcccctgaggactgagaatctacccccgtccctctacgacggccgcctgtctgctgctgagtgatttccagagagcaggtgcgcacatgtacatgtgtttacccacaccagtgacatagggcccccagcctgggtgcctctgctgctacatcttagccagaacttgaagccctttatccccattctaggataaaaggcgagaaggaaggggcagcgtgtggccccatagaatggagctatggaggggttaggatgctgggaccctggctgcagtagccgtgggccaggtaacccttcagggcatggactcttctagaaaccaccacttgcttctcaccaaagaaggaaggtacagagttggccctccacctctagtgcagagcgagggaaggcagtgtgagcgagaacatcctgttgcctcctctgcctgcctactctctgcaaggtccttctgtccagggctcagggccatgcaccagatctgtctatgcccaccagacacagccactgcctctcctctgacttcccaggagagcccctcacccgcccctggtcagactcaagccatacaggaatgggtgttttgtcccctttggccccaggagtaaactacttctgtttttctcacgtcctttcctgccttgtaaggtggcgggcagctccctggctaaggcctttcctgtcctgcctccagggccaagggccattctagacagggtgtcttttaccagggccctgtccccagcctttctgacctgcagggcctggttttgccttggcagctgtaatacaaagggaatttgtgcccacttctcccagtctggtgctgtccaccatcagccaggccaggcaccaagccccctccagagctggctgcaggcccctggcttcccctgctcctcccagggaccatagccaaggtctcttgtgttgagaggtgggtggaaacctgtccttcctgccagacactgccctccctgcttccatctgggccttgtgcccccacccacatccctaccctgcccagactgtctagcctgccctgctccaaggag

SEQ ID NO: 34786 - DNA, 1067 bp, Mus musculus
aggctgcctgcagtcagaacttggaacgtctcattctgtccttgggtatgtgggaaacttgtagtttagttgatttttctcagccagcctttagccctagctcaactgaaacagactggacttgcctgcacgagctgcaacagccaagtgaaatcttccatgtaactagtagatcaccttaggagaagagagagtttactgtaaggcttgtgaaaacatgtctccttttttatattgctttcatggatactaattttaaatttctaaacttttcccataggctttgacaaactacagaaggctctttggatctgtgacacatcattttgggggggtgctcttctctttgtgggttttttcatctttattttggaactatgaagagttatataagagctcagacatttttcttttttttaaactggtgaagaaaaactgaaaagaagacatagaccttttttgttccacttgtttgcactgtgtgctgactgaacattcgttgcactaactgctggtctttaaagatgttttctggggaaaggggacaaggaaggaggaaaagaaaagaaggggagaaaccctaaaaaagagaagaatttgggtgaacacatgcacctgtctaaagttctccactagctgactctactgcatttcaacttctccctgattattcatccgtttttaagcctgaagagcttattacttatttgtgcgaagtgccttatgctacaagaccattaagaatatcatctttacacacagcccaaggaatcaacagagtcatgttctattttcttttttatttctttgcctcttcattttggtttcacgttgaagtctcacctcctgttctaccagtactcagcccagggccggaaggtggactagtgatggcagcgccattttccttttctttatatggaggagttgattcacaactgcagtccatccacactgtacatacatgtatttaaaaaaaaaaacaataccaagtaaaattttcttccgggctgagtagacgtaccatcgtcgctcccaaaggaaagagcagcctctcactgcaggag

SEQ ID NO: 34787 - DNA, 1425 bp, Mus musculus
tgacaagcctctgtgctctacagcagaacactacgctggctcacacgcgtccatgagcaggaaggcactcgctgtaaagacttgtcggagggagccttgaccttctttcctctgtggcaaagcgtgacccgtagaaaattggatgtgtatacttgtataaactttgtaaataagttttttttctgggttcatatatatatatatatatataaatatatatatatacatacatatatatatattattttttttggatgaaggttgctgggattaagggattagagtgattatgggagcagctaaagatgagaggggctcagttttctgcaacactaaattctaaaaagtgctttggcctctaactgtaggaagcagacctctgcaggctctgtgttggaaaggggccagaagcccggccacactgctcttgtaatgaatgcacaggcagcggtcttagcagacagcaaaggagctttgcaaggctgtggtccctgggggctttgagaagctctgtggtttggctctcctgtcctaaacgtttgaggaacttcccaagttctgcaaaggggaacaaagataaatcttccttggagtgtgagaagtgtacagagtgcagtcttagaggagagtgtgtggagcatggatttttatgtcaccggaccagccagtgcagcctcggcgggcttggcagttgtggagcctagttatccgcggcccctcctgttgtgtgtgagcagcgccctctgcctatcttgataaatacatttttgcaggaaggggcagcccgttagagctgttaacgtccatgtccatgctgcagaaagctgcttgctgcccgttctctgtgccgcactaagagttgctgtctgtcgttttgcattgtaaatcgctggcagatgccttaggtggtagtgttgctttaaactgtgcccctcccaacacgcttgatgtttggcctgatctccaggcaaaaggagggagatgaatcaaccagtgaactttttttttaaaaatgtttttaattcccttttaacccagtatactaggtcaggaggcatctagggaacaaaaaaagcaaaaaacaaaatttaaaaaaaaattgattttcatattccatcactttgaagaccttaaaactatgacaaggtatgttgagtctgcttccatgcttaactcgtctgaagagaggagtcagttattcaaagttgctttgactttgcctagttctaaagcaaaactatttgtgacttatcccaaattctttggggatcaaaatcctacagatgcctccttatcagagataaccctgactctgtaacaactgtagcaggagctgcacggtacaaatccccaaaggcaagtccagtcaagtgttggctacaaaacaaaccaaattaataaggaagtcacttttttagggagggt

SEQ ID NO: 34788 - DNA, 1268 bp, Mus musculus
gcctctggtcatgtagttgtgtgataagtaacagactgttacacacttgctgctcagggcctgtttttttctctcccttagtgttctgaacatgaaagaaactttcttaggaatggaatacatttaccataaaatgtttttcctggaaaggaaaacctaagtagctctaaattatttccaggtgggcaccagcatcataacaattggttggcccggtggggtggggtggggtgggctgggtgggtggttgtcatactcgttttcagaatgagatgagggcatctttccttggccacctgctttgtgctggacaccatcgtgctcggtgagaacagagcacagcacagagtttggagtgacatgttggaaacaaaacatctcattctgatcatttggtttatttttttttaataggggtgggaggggagggtactgtgtcccaaaagggagggtgtctgcactaaggatttagaaacactttggaagctcataacctcatgggaaactgcctttagccacacacactcctgacctttagatgagtaacaaaaagatgaaataagtttgtgggaattaagccatgttattttaattggatacttttttttttcaactctctgtgtatctttaaaattgttactgtggaatgattttcttgccaaataactttgtcaggcaaaattattggcctcatgggaggtgaagtaagccagattttgggtaaatttatgtggactttggtgagtttgtaattctactttatattcataaagatagttttttaaaactcccaaagcaaatctattttcttctctaatgtaaaaactcatctttggaataaagagttaagtgtccgagggttgtaacagatatgaggtcagagggagctagcctggcctggactctgcccctccacagctgacagactccaacagaagtgtatttaaatctccagtagacagagctgggcagggcaagggaggggtgggcctgggttagtaagctgcaggctgctgtattttaaccagtggttcttggggaggggtgctggagaatacaaagtcacttcccttttttgaaacaaaacaaattagaaaaaaaccaatttttttgtttagtaaaaataagaaaattctaatgtccctagtcacaagggaccagttccactttgagcagtaggaacttaaaaatttgaaaacatttggggaaagggaaaattggctttctgtttaattggcaaatgttccagtggggagggtctgtttttg

SEQ ID NO: 34789 - DNA, 2522 bp, Mus musculus
tttagagaatgtgatatattctgtgatgaaaatgtagttaacatttcagagactcaccattgttttttttcctatccccttcccctctctctgttgccctaggttaccaaagtgacccaggtggatggaaacagccccgtcaggttttccacggagaccactttcttagtggacaaatacgaaatcctgtaataccaagaagggaaagctgaaaaggaaggatttcagattaataaagaagaagccaaaagtggctgaagagttttccaaatttacaagccattggaggtcccccaacccccttttctgatacagtgcacgttctctgcgcgcaaggaccctcaactcacacccagtgttgcggtgtcacagagacatttttgacaaatgacactgacataaagggaaaggctgctgatttctttggccagcaggaagccagctctccagggaatggaatgccccagtaaatagctcttctgccttcacctaagtcttcctttattttaagccctaaatataggtatatttcatactttgttttaaaaagttttctctatggatttgagtctttcacacccctttgctttctgttttctttcagtacacttagtcacacactggggtcatctgtctgttgtactgtgttcagcactctgagaacaaggttatctaacccattcttgacattagacagtaccagtgaactgcttaagggatgtagagtctagaagttgaaatacaaggttgtcttgttttctctcctgtatccatccattgctccatctctttatgaagtcgtccttgtgagccctgcccttccagttgcaggcagtgttgtgaatcccatttgtgtcaatattaaaggtagccagctgggaagcagcttttatgtgtacacaccttttcaagatgccgaataagatggctacatccatttccacaggaaatcatgtctgctgctaatgctaccccaacttacagttccctacttgacttatggttccctacgtaacttacagttctctccgtgctgtggggcgattgagttgaagcacgtagtccactcagattccgcgtgtccacctcctcccttcccagatgcttttcccttcatcagtcttctttccagcagaaatgagtctagtgagtctgtgccatttctcattagccctaaatcactggagagatccatctttaccatttcagtggtagcattttgagaggtgtatagtgaggggttactcaaatataccccatctaacctgacatttaccacctccctctctgtccttgtttctgaaaacctttttttctcctcctcaggctttttggtgtcatcatgtaataattgtaggagttctcagctcattttgatctattaccttttcaatagaggctgaatcagccaatcccacccgccaagcactgaactgggcgggatggacgatcagttgctgaaggctgcaagcagtagcaatgggaaacagtagatgacctccattctctcaggtggctgcagagcagagcagagcagagatctccctctgaacacctgccttccctggcaagagtatactatccatgaagcagggcagtcccacagaagactgtggctgggatggcttgccaaagaaatttctagcctttccctttcccctaaactgcatcagggaagaatccttatctctagcttcgttttcacatgaggttttctgaggaaggggactgggataggaagtctgtcatgtagtaaagtagacgagaaatcttattaatccagttgtatttcagagtttgtccctatgatttttaaagtcaagtttaatttcacaagactttttttctgaaattacttttggggtaatatttaaaatgagagacattttgtaaccctgtaaaatacatagggaatataacattccaatgtacacaacgaaggcaaattcttaatcaaataaaagagtattataaaatgagatgtttactggactctaactttgaagtctgctggtgattcatgatactgtaataggatctaaaattaaagattaatgatatgttttttttttaaagaaaataatctatccaagtgtattcattgccttgtctctgattcccaggtattgtgcctctgttgtgtgtttgagtacacacactcaatcccgaaagcagaggtttttggtagaattaggcttcttggagcttttgccaggtctggagtattccaatttttagcagtttagagtcagtcaaatgaagcatttttttaaaggatatcattctgcagtatcctgaagcctgccctttgtcagacagtgatgagtaaatgaatagggatgggggatgctttagaaatgtgcttatcgggctggtgagatggctcagtgggtcttccgaaggtccgaagttcaaatcccagcaaccacatggtggctcacaaccatccgtaatgagatctgactccctcttctggagggtctgaagacagctacagtgtacttacatgtaataaataaata

SEQ ID NO: 34790 - DNA, 1167 bp, Mus musculus
gatttaaaaaaagaagaaaagaagaaaaaaaaaaaacttaaaataaaataaaataaaaaaatacaacacacatacacaaaaaaatcttttaatgaatgtatctttctaaaggactgacgctcaatcaaatacctgaaaatactagaggtcacagcctcatctgatgttaacttttattggatttgggattctttttcatagaaaccaagttgttttttgttgttattgttgttgttgttgttgttgttttttaaggaaaagcgggtcattgcaaagggctgggtgtaattttacgtttcctttccttcattttaaagcaatacaaagttattgaacagatagttttgtgccgaatcatgaataccagtcaagtctcacactctgaaaacttgcaacctttttgtttgtttgttttggttttcaaataaatataaatatatatatatataggaactaatataggaatgcaccattgtaacaaagcctagttcagtccatggcttttacttctcttaacactatagataaggattgtgctacagttgctagtggggcagggaaatgtcaggctcccagtgacagtgacggtggtgctgactccacatacggatgacagacgcccgcctgtcccgagaggagcgtgcagagcagatctgctctcacctggcttcttcctgcctgtggacgttgccagtcggtacctgtactcctcgtctacttccggttatgaatgttggggtcaccacctgcatctaggggaaaattgtgttctgtgctttctggtatcttgttctggggtacactagttctgtctttcaaccaagaaaaaaaaatagatttgtggtgtttcttttcttgaactttaacagtctccttagcaaatacaggtagttgaataattgtttcatgagctgaacagtggcaagcttcatttctagaataagacatttctctacagctgtgtcatgtacaatggatcttttgggggttttttgtttgttttgtttgcttccctttttttccttgtgttcttccaagcttctggttagagacaaagtggggggggggaaggaaaacgtgtctgaagcccatcagtgttaactccctgagacagggatgaaggaaaatactttaatattcaaaaaataataatgctgaaagctctct

SEQ ID NO: 34791 - DNA, 1913 bp, Mus musculus
ggctgtcttggggttgtgccaattaattaccaaacattgagcctgtggctgtaagtgggagtgttaccctgtgagccttaccgtagccagtgacctttcttgacgataggagcggctccctctccatcccttctctttactccctcctcccctcctccatccttcatctgctgctttcccattctttctgggtagcgggagcttgcctccctgctcaagggcactccctacttggtataggaagtgcctacagaaagtcccccaagccagtaagcactccaggtggggaattggacagaagccgttggccgtaaccagacggaatttggagatctcataaagctccattgagagttttaaagagatgtatgtagcgaggtttttttaaacaagagactaaagattatttaaataggatttgagtcatgcagcagcctgagtccatagccaggatatgcccatccccttcccaggacgtgcttactctctttcccctttctgaagacataggaagatgagtttctaaaaggtcagggtccagctgaaagaacactaatcagatttcaaggccccaaacttgggggactagaccacatgtgctaagggacctctgccacccgtgtgcagcctgtggctgagcaagttcaatgacactactgccctggttactccttagggtgtggacagccagcagcaaatgtttctttcttcccccaagacagagtcttgaacctgttagattaagtcattggattttcctctgttctgtttacagtttactatttaaggttttataatgtaaatatattttgtatatttttctatttgaagcacttcatagggagaagcacttatgacgaggctatttttaaaccgcggtattatcctaatttaaaagaagatcggtttttaatgattttttattttcataggatgaagtgagagaaaatattcagctgtccacacaaagtctggtttccctgcccagcttccccctggaaagtgtactttttgttgttccatgtgtagctcgtttgtgcccattgacataaatgttccttgggtctgctctttatagtaactgaaaaagaaggtcacccactccattaggccactgccctccagggccaaggactgagggtacagaaccttagcacaccagtgtctcctcctctttgctgtattgccccctccctctggatcagccccagagtgggaagcagcaggctccgtttcgctcccctttctctttctgagttagcaaccaagaagctgcaacttgacattcgccatcacatctgcctcatccatcacctcctttccttctctgcccaccaagtccttgtacccgcagagaacccactgaccgcctcctgccctctcggggcagattgttgaacctgaagcacagtatgaccactcacgatcaagcagatctctgcgcctgccacaaggtttcagggtagcgtagtccgagtggagggcagggcaccctttctcttatggaagtcagcaaagcaatatgatgcagcccagaactctctgccaggactcgtggctctgctgtgccttccatcctgggctcctttccttctgtgaccttaagaactttgtctggtggctttgctggaacattgtcactgtttccactgtgggaagcccagcactgtggccaggatggcagagatttccttgtcatcatggagaagtgccagcaggggactggggaaaagcactctacccagacctcacctcctaccctcctttgcccatgaacaagacgcagtggcccaaggggtttcactagtgtctggtttccttcttattgcactgtgtgaggtttttttgtaaatccttgtattcctaatttttttttatgaaaaaatgtaagctgcatttgttactgaaagatt

SEQ ID NO: 34792 - DNA, 1642 bp, Mus musculus
agatggatctgcacatagcacagcttaccctggaatccctaaactgacaccacaggttcataacgcaactcctggagaactaaacattagcaaaattggcagttttgctgaaccctctacagtgcccttttcttctaaggatacagtgtcctacccacagctccacttgaggggccaaagaagtgacagagaccagcacatggatccttcccagtcagtaaagccctctccaaatgaagatggtgaaatcaaaaccttgaagctccctggtatgggccacaggccatccattctacatgaacacatagggtctagttctagagacaggagacagaaagggaaaaagtcttctaaagagacttgcaaagaaaagcattccagtaaatcctacttggaacctggccaggtgacaaccggtgaggaaggaaacctaaagccagagtttgctgatgaggtgttgactcctgggtttcttgggcaacgaccatgtaataatgtttcatctgagaagattggagataaagtccttcctctttcaggagtccctaaaggtcaatccacacaagtggaaggatcttccaaggagttacaggcaccccggaagtgctcggtcaaagtgacacctctgaagatggaaggtgagaatcaatccaaaaacacccagaaagagagtggccctggctcccccgcacacatagagtcagtgtgcccagcagagccagtctcagcctccagaagcccaggagctggcccaggagttcagccgagccccaacaataccttatcccaagatcctcaaagtaacaactaccagaatcttccagaacaggacagaaacctgatgattccagatggccccaagcctcaggaggatggctcttttaaaaggcggtacccccggcgcagtgcccgcgcacggtctaacatgttctttgggctcaccccactgtatggagtcaggtcttacggtgaagaagacattccgttctacagcaattccactgggaaaaagcgaggaaagagatcagcagaaggccaggtagatggggccgacgacctgagcacttccgacgaagatgacttatactattacaacttcacgcggactgtgatttcctcgggtggagaggagcggctggcctcccataatttatttcgggaggaagaacaatgtgatcttccaaaaatttcacagctggatggtgtggatgatgggacagagagtgacaccagtgtcactgccacaagcaggaaaagcagccagattccaaagagaaatggcaaagaaaatggaacagaaaacttaaagattgatcgacctgaagatgctggcgagaaagagcatgtcattaagagtgctgttggccacaaaaacgagccaaagctggataactgccactctgtaagcagagtgaaagcacagggccaggattccttggaagctcagctcagctccctggaatcgagccgcagagtccacacaagcaccccctcagacaaaaacttactggatacttacaacgctgagctgctgaagtcagactctgacaataacaacagtgatgactgtgggaacatcctgccttcagatatcatggactttgtactaaagaatactccatctatgcaggccctgggtgag

SEQ ID NO: 34793 - DNA, 2223 bp, Mus musculus
tcaatgacagtaataacatccaaaaatcctactgtcctgtgtatttactagcccataaggtctggacttaagcatctggccttaatatagctctgtaatattacagagtaactttccagataaatgcaaataccttagtgtgtgtatagatttttttggctggtggagatgagggaatcttatacaacttttgtattatcttgtcacttaaagatacgatcacaacaaacactcctatgaggatctcaccaccaaaaacatagctgcacaatctttcagtgagtgacagtaatgtgtggaacttgcagtaaaaggataaatgagaagctattgggcccctttctcttttgtgctccaaggtctaggcctaggtaaaataggcaataaatattctatctacatgaaaatgtcattttaggacacttaaaacagtatatctcagtgtatatgtgttaaacacagatactgtgtcctttttttattagtctcacttgagtgccacgttatatcgtgtcttcccaggtaagatttatgtagttggtggcagtgttttctcacttgttctagtcaggtaaaaccctaagactacaatgtacatagctagtgtttgggctgtgacctggcttctaagagctgcttcttatctagccttagtttatcaattaacaaagtagacattaaagcaagccattttaaataaatacttctctctgggtagttactaagtgattctgcccacttctcccaactgtttgctctaagaggcccagtcctctgcgggatgttttcatatcagtgtcagcccagaggtgtaaaggacaagaaaatgtggctgtggcttcttttacagaacattactgttacaaaagagtatacatatgcaaaagcgctgtttcagtattccaacacaagctgctataggcagtcctttgtgtgttttttcttgttggtgtcaactggaaaacttgtgattagagagcatctcactctggctattgaagaatgtacctgttgtgaacagggaagcctcgggcatatctataaatgccggaaggttaaggcagactcagtgtgcccctgggcatttagctagatgttgacaggatttctttcctttaaatgaacttcatttcctgtatgcagcattctcctctccctctctgggaatggactgcatatgaaataagcttctacctgctgctcttacttttccagagtgaatgcgggaggatgcttttacgctcttatttgaaaaagagggaagacccaagtttcacaagtgaaaaatggaggaagatgggtacaaacccttgagaagacagctgttgccagcagctttctagtgaatgggctccgtgctgcctccagtgtctgtattctgcttctgaactgaaccgtcagattgtaagcctgttttggcaagcttgtgttttgttttgtttttaaactcttctgatactttcctatgaatggccgtgacgccacccaagctgctgaactcctttaatcacaaaagcacgtgtgtagcttaaggccactgtggtgaggaaaccaagtgtcctctgtgccttctttctttctgtgaactaatttaaaggcatccagaaaaagaaactctaaagacttccatcctggtacaataagaggcatatgtgcattgcaaaggtcaaagggtgtcttgtctggaactctgcagcggctgtaaatctgttaagacttctgactaccgagttttacatgacggctttgctggagtactaaaggaaagtgaagacttcagtcggctcacacctcaccaagaggctaatactaaacttggaaaattgtttagagttcaggcagttgtttgtttgtttgtttaatatagctttccgtgggtgtgtgaaaattgagggacacttgagaagtagcataacgaacggtgcaggtgaaagtgccagttgctgctcagtaccacactctaaacgcttcattactttatttggttctggttgctaagcagccattgggcaaagccaaagcctactgggtactgtgacaagccagactgatgctagagacagaaaatgaagaacaaaacagcaaaaaaggttaaactgaaatcaaactcaatagacaactgtatttgagacattccaggaaagttactttttgtcagacttgcctgtgtgtgggggtgggtgggggagggtgctcaaaacttgtatttaataaataagcacc

SEQ ID NO: 34794 - DNA, 2174 bp, Mus musculus
acagcacacaggtgtgctcaggggtctgaagagatagctcatctatcctcttgcagaagatcccagttcagttcccagcatccatttggtggctcacaaccatcagtacccagttttaggggaggtgacactctcttctggtgtctgcaggcactgaatgcatgtgatacatgcaggcagataccccccccccaagataaaaataaattaagtcataaaaagatgagctaaccattccagccacttttgattaataccaaaatccaaagtcacacaggaagtctgattttcatggctatctttaaatggaaacatcttgttttactgattttttttcagtatcctaggtttattgttttgtcaattattccaaggtttatagatgacagcgcaaatctaagcacaataatgacaaaaggtcacaagaacaccaggacaccagcaagtgctaccaggatgaatctctcagcatcacttttgtatttatttatttatttttagtcaggttctcactatgtagtgctggctgctctagagctgactatgcagtgttggcctgaaacctagagacaccccctgcctcagctctcaagtgcttcactcaagggtgtacccccacatctagcccgactgtaggtttgtaatgagcacagacagcgtgcttgctgtgtgctcccttttacccccagctcaacattctcttcatttgcagactggagcccttaagcaatttattagaagacttcgtgatacacgataactttaaaagaaaatagacttgtgaagaaggccaactcaaagcaaatgaccattttttttttcagtcttatgtgtgagaactggaagagattatttaaaatacttttggttttaattcaccttactttaaggagaatttgccatgggccaaagactacctaaatggaaataaccaattttatttttccctttatttgagtataaagcaaacttttcaagtggcctatggaaagaagagggatggctttcttctttgtgtctggttacatggtctgtgcacactagcattgtttggagaacagagaccatctaaaagttcaggtccagggtgaatctttgcgatgtgatggtttagtcttcactgactgggccacacagactatttctttttaacaaactggaatttccaaaagattctatttctacatattggatcttgtaattttacccagtctttacaaacaaattggcataatttaaatataaattttggtcttgaaattcattctatacatcttgttccactttttaaaatgcctaaaaaaggttttgtttttatttctctccctcccccccccttaaaaattaagacagggtctcactactatatagttctgtctatcctagaacttgctctgtagaccaggctgtccttgaactcagagatcctactgcctctgcctccctagtgctaggaataagggcatgttccaccataccctggtctaaaattttgatacctagttttgaagctacaagttagagctatattttctcttgtgaatataacaactggatatttctttaaacagatggcctgtgtatatttcatatttgtaatgaagtagttaaaaactcacagagaatgtctccagggaacttgcagcttgtgtcttgtttgaatactcatgggatatcaggttcttgttcagtgtctccttcctaagagtacttttgtactgtaacttattttttattatgcatgaatcactgtgtaaataaacccttagtaataaagaactatgatttttattatttgcttacaaacaaatctgcaaaattcacaacagcagttaatggaaaacaagggaagatgtttaactttgctcaagttttcttggtagatagtagagttagacacgcagagcaatcattaattgatgaaattaatttctagtagttttatatttctataggcttcacatattgctttggaggactgggaaatgggcaaaatgatagcacacatttggaagactcatttcttggacctaaccctaatctgagtcttacgactgaagtccaggttgtccttagttcttctgccccagtcttgcagatcttggatttacaggcttttgccatcctacctgacttagtttgggaactttagaaacaaggatatttgtttttct

SEQ ID NO: 34795 - DNA, 2009 bp, Mus musculus
ttgcagtgcctacatctccacacgacagctccgggcagcagagcagggctcacggtgtccatctttgggatggatatcttcaagacaagtgacctgttatgcaggggtctgtcaataactccagtcttagttacacacacacacacacacacacacacacacacactcctccgtctgcctcttagcattgtctgctcttcactggccctgggggtttcaagggcatgccatcggtgggatttataggcaaagggattatgctgaagatggggagaggatgaggtatgggtgccagaaaggatctgggattgacatgtgagttgtgtctccacagcctccagaagccaaggccagctacctgacgcttcagagactgatgtcgaggcttgagaaaaccggctacttcataccagacctttccctaggagaagccaagaatgcgtgttccctgtgcctctccctgccccccactaaccccagtcctatattaatgatgcaacacttctcactgcagccgggctctggaccctgtctgtgccgtgtctgtgccgtgtctgtgccgtgtctgtgtgtgtctgctgactgtggtcgaccgtggatttcattgtttctgtgaactgtgtgcttcctctcccacgctaccatcggcgccttgtgtcctcctgtgacctccatctcctcttgctctctggagtctgctctgttcctgaggagccctagtcccatctctggattgagagagagttagttgtccccagggcaggagtccccagcggacccagggctgagaaagtttgttgctattctttgtggactctcagaagaaacttgctctggattccaccagttcagaaggtctgtttgcagctggagagtcattgctgcaggatctgccttccagggctccttttccttttagggtgtccactgcagagtccccatctgccccaccctttagggaacacccaggaaatcttgcctctggggaacgagctcctctcttatcttccgagcaataacctggtaggctctggagtccccctgccttcatccacctttcctgcttctaagacttccatctctggcccgatttatctgagcagaggactcctttcttctccgaagctggtctctagcaggagatagtcaaggggacaggcagtggaaagggtggggacggttctgtctctctgcctggtggtgtggatatggcagactttgcagtttcttgtccctgcctgtcaggggtcagagtggagagggatggaagggttcaggggcagcggggctgagggtcagagagcaacagggtatgagcagcctggatgcaaaggccagaagtcaaaagtcatcagagtggaaactcacaccggagcctgcccaacctgcctaatgtgttcccttggaaactaaccaagccacactgtgtactgggactgctgatctctgtcttgtgatctatatcctctgacaacagaaaaataaataaatacagcattgtttcctagtgactctgagtggcttttcttctgagaatctgagggtttgtagggcccagggaacttaaaggacaagagagcctgctccccagtcagagggagaaagtcaagactagaggatgccagaggtgccaggcactttaggcctcttttgctaggggcttccagagtccagctttggacctcctctgcccctccccctttgttctccttttacaggtccctggtcagtcaggctcttctcacctgtcaggacaagttggagcagaaaagagccacaggaggttagggatggtgacagtaatagagacattcccatggaggttggtttgttcttaagtactgttggccaaataaacacagctgctggcaggttcctttggagggtcgcagcccactcctgtgcacagccctatagccagccccctgtgtgtcttgggtgagtcactgctcctagagagtgaggaataagccttattctaacccaagagtgcctagcgtatcttaggg

SEQ ID NO: 34796 - DNA, 1099 bp, Mus musculus
gccttttatctgtcttgcctcattctctctctgacatccaaggtcagtgctctcaagcttgcatgtacattagaaaaaaaagatgcaaggtttgttaaaatatagactgctggactccaggctcaaggtttctgacccactgggtctgagaggagacccaagaatttgcatttccagcaacatctcagaggatgctcttggccccagagcacctttgagaacctctgccctggaggggttcttataaatcacctatgaaatggagtccagagaccaggctggggccccatctcagcttcttgctagaaatactaccaagaagctaatctatttagaaatggcatctcatcctgagactgtgttttctttcttcattgactgggaataaaaacacctagttttagcaccctgagacatcataggagagtcacactggaggattgtgtctaagtgctcctaatgtttgctagctgtctggtgttatctactgggtacaatcacctctggcccgttagtgtttctctccgtcccctcagctgttctacctctaggatgtgactttactcctctggttcttttgtcattagaagtatcaggatgtagggactgttgctgagagacataggatatgtgtaacaacagctcatcaaagcccacgctccccaaaaaggtgtggtcacactatagccaacctgctttgtgacttcagcccctacaagtgtggagttgctagcatgtcatgagaatggttcagaagaggcctgaacaatatgagaatcctttcagagcaagagaaaaaggcccaggtagggtgacccaagtttatctggagacctgatgaagtgagtaggaggctgttttggtttggtgtgtgtgtgtatgtatgtgtgtgtgtttgagtttgtatgtatgtatgaatgtatgtgtgtgtttgtttgtatgtgtgtgtgtttaagtttgtatgtatttatatgtatataagtgtatgtatgtgtgtgcatgtgtgtttgtttgtatgtgtgtgtgcttgtatgtgtatgtgtgtttgcatatatgtaattgtatgtatatgcatgtgggtgttatatatgtgttcaag

SEQ ID NO: 34797 - DNA, 1428 bp, Mus musculus
aacagactgaatgtgtttcattactgaaccccgtgtggggcggggcagggcggcctcctcctctattacaagtgcctgaggagccgccaacattttatttctctcatcaagcatgtcctccgttgtgaaccccaccgaggacttagaggaaccaccgggttagataggtggagagtacggctgtagacggccacgcacgcttcaaccatggactgtcctgagcagaaacatgtggacatatgcgagcttctgcaccaaagtggcactgagatgtgggctgctgaagacttcaggggtgtggacaccttagttaaagcgactgctatgggaggcttagggatcctccttggaggttggccccctgctgaggatgtggtcctttattcacatggcctcctagcatggcatgccctggcactttggctgtgctgggtctgtgcccctttcggatacctcagccccgacaggatcatacccgtccctctctttttgcctttttttttctttgtaaatgtcttctgactgtcacaagtttgggctcagctgcctgagcccggctggatgttgctagaggggccccgagggatgttctgtctccttcccctcggctggcaccgtgatttcctcacgattctcaggagcagccctctccccccttagggtgctctgtggagctcttccttgccctcaggtttcaagcacctatctttccaggaagccaaaaaagccatagggaaagaggggaatgccttctgccccatcttgatatttctcttctttaactcgagtgtgtctatgagccctatttccatctgtccttctatctgggccgcccctagcccagtccaactagcaactctgtccagagctcagtggatggaactgattccagcctggcaccagcagggaccatcttgggtcaggtgcttctggctagtgcttctggctcaagcctcctcggcccaacttcccctcagcgggctctgcaggagctgcaggtgatgctctcagcatctgtctccttgtttaaacaaaatgccctcatttttcttgtcttgagaagctgcgggctgcctctacccccgcagcccacagggtctcaccgatttattgttcgtttctttgctgtggaataaacctcgagcagccagttggctttttaccctttagatattttttagtcatcggctgaccacacacagataaagtccgttttgttacttcttccactctgtgtgccttgagaaccgctcatgtggtacaaccaattctggtgacaatcctgtgatttttttttttttttgcacctattaaatctctgtaagtcaattttctatgaggcagtcctgtgagtgtgctggtctctttggaagccttgtgttcttcttcccgagggacaggaaggtgggggtcaatgggtcttcaggg

SEQ ID NO: 34798 - DNA, 4569 bp, Mus musculus
tgtttaatactagccaatgcgtggtgtttccttagccagataaatagaggggccattggagagggcaagagaggaatgaacccactcagtattccataaagagcttatcgttttgtaccactgggcaaaaagaaagaaaataaaaacaaaatccaggcagaggcaaatgcatcagccctaaccctgctggatgaatcttgagggctctgcctttgtggatcagagaggaggactctcctgtctgttccttttagcaccttggttggagtgaacctatgctgggaagaccatccctagccctacaatattctaactgttgtcccatagggcacctaagaccttggggttgggtcattttggtgccacttagcatgttgaagaagcagagagagacagaattaacaagataggaattcatctgtccagtgggacttttctcatgagcactgttcctctaagagtgttaaaaagagctctttggctaataagccctttttcccccatttcatttcagttcagactacaaccacaggcacattggggaatgatacctcttagtccagatgggcttctgtcttggagatgagtctaaacttggaactagaaagtgatcagagttctgcctttcccagttttgctaccatctccttcctgtctctatcctatcctgtctcctcatcttgactgcccccaggagtataaacattcgcatcgcataggttcttgtttatctcaagacgcagtctttgtaccagtgtaggcttgagtctgcagtccctatcactaaagcaactggcaaacttcactttcttctgctgactttggccagcagggaatgagattggccctttctctgccagggtaccacagggacacatgccgggtagcctgagtatgacgccagtacttctggaaggacataaagaatactttaggttggagactctaaaggatgctgggcagagggtcagggctgaagcttcaagcagcaaaatttccaactcaagtttgtggtgtctaaggatattcctgccaccagaacgctgcttccttccctctcctgtgtcctacaggtgcaagccctgtaatccagcttgcctgatttctctgttctgtcacgccagaagcattggcaggttggtgagggtcctgaggtgctctggccacaggtaccatccatagctccaactcatgtgaccaaagggaaccacccagatgtggtccaggggcgtctccatcatctgcccacgggcctccttacttgagcagggagatgtcatcagcaaagtcatcgtgctggtggcgcaggcaacgcaggcagcgccactgacataccatgaggcagagtggcaacatgaagagggcgcagatggccgccatgacataggctatggtcataagtgttgactcatctgtctggggaatgttgtagccacagtcttccatgtctgccgtaacaaacggaccttccactgccgccgtcctgaactcatcgtgcactggagagagggtggagatgaaccggtagctcttactgtcatagagtagcttaggttatacaattaaaagagcttcctgacaggggccccttgggatccacccaagtgagactgcagagcccaacttggacagagcgagcagtaggcagggaagctagtactgagggaggctgtttctccttccagggcctcgggaactggactgcaagcctctcccattctcacatccagtagaggtgatatcaaagtcaacagttccaagttgaccaaaatctagctccttccacacatagcagacttacctgtcttcatgaaaatgcaaccacaaagccctggcccttttctgcagtagtactcagctttactgtgggcgggcagccacccttgcagctagtatttccaagtgcctgggaagctcgagctgctatcagtttccaatagtgctttccccaccaggcgtgttcaccagagcaagccttagccctagctctcacacatggttgattagccagaggcagctactactacctcccaaacaaagagatctgggtattagcagctgacagcaagaacatgagctgactgaccccacaccctcctcaccatggcaagcgctgacagcaaagccaattcgctttcgggctcgatcgaagacgacatagaaaccttccatgatgacggctcccataacagtgcccgtggatgactgtgagacagcgaacttgtaacagtcgtcttgggacgtggccacgtcctccaccggccgtaggtattgctaggggtaaacagtcacagggtgagagcatgtctgattcttcctgccttcctctgccttttagtctcctacactcttcctcaagccccaagatgtggattcttctgagacccctttaccaccacacattcgtttcatctttcaagttgtagcaagctatgtctctttacatactttgtctgctgcttggcaccccactgtctcagcttggggacatacctgaggaaggatggtgatgcggaaggactgattggtgacttcacccatgaggtaaagtgaaatgactgggaaaatgttccaaggggtcgtgcctgcttgccagcacaccagctgctcccctagccaaaagccatccgggaacttctccgtctgttgacaagagaggaatgtgaagcctcggcctatcccaccatgtcttctctgtgttcagaaccacagtgacagtaccactgtgtgcttttccagggaattttccaaagtagcaaaggtaaactgaagtctacggatcaggaggagaaagtgagatactggcctcataaagctgtgagtgggcatggtggctcacactgcctgtggtcccagaacttagaaggctaaggcatgaagttgtcaagttcaatgctaacctgggctacgttcatgaccccatctcaaaaaaaaaaaaaaaaaaaaaaaaggcatctcaatgccaagtcaacagagcagtggtttgtaagcgcctgatgggaaggatctacgtatctttagggcttgctgaggagtgtgactgtcactgaccgaggaggctgccttgatggacttgacggcagcttcaaatactttcttgggcaagcgaaggttggtggtcccactgtccacaatgctcttgtcgtagttgtactgaggagagagggggggagaggtgggaggggtgaatctgacagctaagcatcctactggggttggcatcttagctttcccattttgtatatgtgcgtccttgggcacgttgcttaacctctgtgtacctgttctcttgttctaaattgaagataataacagtgcctacctcaaaggttaccataaggattacataggtcaaaaggctgaaagcactaagtaggtcctggcagatcccaggcacttggtaagtactaacttcgtcaccttgtgcgggtaggtgttctctaaatctaaagcagaaatgccttgtgtggtatttgtaacttctagtacttttatgtagttattctcattcaccatacattataatggagagaagggtggctcagcacgcacaaagccatgagcttgagctctgatgctgcatggtggtatatgcctgtagagagacacttgagagtcagagaaaggaggaccaggagttcaaggtcatctttagctacctagcaagtctgaggtcagcgtgggctacataagatcctcaaaaaagccaaaaaagggggctgttgagataggtaagggcacctgctaccaagtctgatgacctgagttcaaccccagagagacctactagttactgaaaattgtcctctaacctccatacacaagctgtggcacatgccccatcctcatcccaataaatgtaaaacaaaatctagggaaagagaccctaagtgttggcatttgggtatgccaagcataacgactaacacttcatacattggctttgacctttacagtctgtgagaacgcttgtgtatttctacctctgccttgtagatgaggagtctggcactgtagtgaggagcctgagggcacttagtaacagcaggactctagtcaggtccaacctctgcctcacaaaagccttgcccaaggctgaagaggcagtgactagagtccagaaaggaactctttcatgttttcattactatacttaagtcatgtggtccaggctctgtgactgctctgccaggccccgcccttcaccttagggattgcctcgtgatcctgtgcttccaccctcatggctctcacacactgtgagactccccttatgctcacgagaatcccctccatcccattacctccttgcagtccatcttgagatcttgaccattgatttccacacgtacaatgatcacttcataataccactcccgccggatgggtgtgtaccagagactgcccgtgtatagcgagtggtcgataccaccaatgatctaaaagaaaaagagacagacacctatgtcctagcacagaaggagagcaagttacccaagactaaataataagatcagccatttcttggggtgccaagattctctctaatctcccatcatgccccatgca

SEQ ID NO: 34799 - DNA, 1291 bp, Mus musculus
ttatgtcagtaaaatccacagtccaagaacaacaaaatcaggttccatttctcccaccatcttctgtctactctgctttctagatagaaaagcacaattcacagatttttcccctgggccaagccaccatcccttgttgctactggtttagcctccactaagcactgaccagccaggcttgcaaagtgctcacccttccattcctctggtttcctaatctagctatcccctccccccaaaggttaaggcaattggttcaccaccaagtgatttggtgaccttaggtgagctccagacaggcactggggtgagatgtctgtgcaaaattacttgcagaataatcgtgggatgttggacttcatttatcaatcaagaacgctatgaaggatacattccctgtctagaatacagtggagacagtgagatgaaggaaggtggtacagttgtaagctatgctttgtggattcccatctggaggaagataggtttgccaccgccacttactgagttcttctggtttttatgtctgagacagctgtggctctgagaaccttgagtctttcccaatctttatctttactcctacaggaaatggttttaattaccttcttttttcagaattaaacaagtgttaattgagaaaaaatgcatctgggggaagggtaacatgctactgacaattgatgttttcccatcctgggactgggggtgcttattgagtctagcagtttctgttaggatagcaaagactttgtcctttctgagctaactaaattctcttgtttttctctgccttgcctatgagctcatggatgaattcttttctcttgccttattgtccaggttgattgataagcatgattaggggtggacttcccagggttaccttaaaatctttaagggggaatggcctgagtcttcctttttagaggtcaggtgacctcctttctttggttaatgaagtacttctgtcttcttgtctccagtttggtactacttgaacagaaaaaggtggcaaaatggaagtctacttcctttgtttatttcatgtggcagattcattcattcattttctgtcttaagattgctctctcccttcaactgtgcagcatccagcactagctatgtagtacctcactgtcacctgaaaactgtacattgaaagtgagcataaagaatgttgtgtttagttaaacatagtggcacaagcctgtaatcatggcatatgggaggtggacacacaggagggtcaggagttcaaggctagcctgagctacatgagaccatatct

SEQ ID NO: 34800 - DNA, 1166 bp, Mus musculus
agaaggccgaggacaaagcttagcaatgcatacttccctttctatgtgaagccctgggctccaccagtactgcagaaagaagcaagcaatgagggacaggaggttggctctaggccaggggttgtcaaaatagtccacaggccaaaggcagcctgatgtctgtttttataaacaaaattttattggcacacattggttatgtatcagctaggctattttcatacaatagaggccatatggtctgtaaagtctaaaatatttactctgctgttttacataaaaagttgacagactcttgctctagactgacaaatatctaagaccttgttttctgaggttcaagttcagaggggtctctgcagcaagtgggtaaagctggtctaggtcatgctatgatgtctagggtccctcagagtggaaggcctgcttagcacaaatgaagtaaagtaacttgctggctctttgttcttttctccacactctatactttagctctgcctcaacatggccaacaagggtccatcctacggcatgagccgagaagtgcagtccaaaattgagaagaagtatgacgaggagctggaggagcgactagtggagtggattgtagtgcagtgtggccctgatgtaggccgcccagatcgtgggcgcctgggcttccaggtgtggctgaagaatggtgtggtgagtaacccttgcgaagggaatctagggatgtgtatgccaccctacaaactgtgagacagactccctgagctgagtgttcagttgtgttctgtacctggcagattctgagcaaattggtgaacagcctgtatcctgagggatcgaagccagtgaaggtgcctgagaacccaccctccatggtctttaagcagatggaacaggtggctcaattcttgaaggcagctgaagattatggagtcatcaagactgacatgttccagactgttgacctctatgaaggtataaggaaaaaagggctggagccagtgggcgagtggagagcaagattatcagtcaaggagaaggaatatcaaaagccacaaccagctctgttgatgtgttcatagcaggaatgggatatgccaagagaacacatagcaaggggaccagcttggtggtacagcatttcccttctgggtacaagggcctgttttggatcc

SEQ ID NO: 34801 - DNA, 1595 bp, Mus musculus
ctccacccacccttaggttttgctgacgttggatgacgacttggacacagtacagcgggacaagatctatgtcttctagcagcatctgtggtccaggcttcacctcacaggcctagcgcctgcctctgcatcacctgccagttgccacaagaacaccacgggtatgagtcccagctctgctgcccagcattggatgtcgtggcaagacagcgagattccagcccaggcctgactcaggatagttcctggtggcactgagccttggagttgcctctgcggaggaggaggcctgctccgcattccccagacactggccaaattgctgctttcttctcagtgttgggtcctccccaggaccctagtctgtccatctgtcttgtttatccactggctctccatttgtccctttggagaggaaggtgggaaggcaatgtcctgtcccatttcatgccttgcattctgcccatcccttccctcctctcagcttaggacacacagccctttcttcttcccatgctctgtccaggaccacagtctggtgcctgattctttgtccatcaccaggacctaagctctccctgggtctgtagctggctgctatcactgcccactctgacctgccaggacagatgcaggtaggagactttgggggctggccagctggtgccaggctttcggtgctaaggcctgcaaggggcctaggtacgaccctcctccctgacctgtgcttggagctggctcttcagcagtgagggccagcccaagttgagtcttctgatcggggactgaattcagaggccacctcatcccaccagccactagaatgatgccagcactagggttggtgggaagtggcaactcactgtccccttccacaccctcagtcctgccaagccccagatgggggcctctcagtgccattgacactgcccaagaatgtctagaggccacggaacggtgccaagcacacagtcccttttgcctctttcacgggagcaggagtcccagtgcctgtcgtggaaagggaggaacatgccaggtccctgtgtgtccttggccctgtctcaccaaaggactcagggctggtttctgagtttccgtccagtatttagccaagttctgtgttagtcacgtaggcctaagagccttggcgtttacagagtcacccagctctggcccctggccattctggtccttggcgtttacagagtcacccagctccaggcccctggccactttggtacttggttgcccttcactccaccaggtccattccagatgccaagagtgggccccaggaatgtgtttccttctctccaccatgtttttatagctcttgggctgggagaagaggcgggtctgggtctttgtttctgagctttgttctatgttcctccatgctacggttgcaattgttttctatgaacgagtacattcaataaagacaaccagacctgggatttggggtcttactgatgtgttgggaggtgcaggagcctccgtgtcccatttattttggccttcccgtctcgtttctgtgcgtggctacattgggaatgaccttccttgatcccaccaagccacccattgattct

SEQ ID NO: 34802 - DNA, 3397 bp, Mus musculus
cagaccaccattgcttgactggcccatcagtgttacagcatcccgcttcctcagatcagttagaccactggcactacagaatcctttcttaaggcactttgcattgtacaatgttcctggatgcttgtatgtttgaaggggaggagggatttaaattggtcctgtatataaaggttttgtttgagaggagaaaaattagccaaggaagattcatttgaaaccagaaggggactttttagttgtttatgacacatttgtagaattatcacttttccctaggacaacatcaagcaagagtacaatatgaagattcttttcttggcccttttttctatggattatgtcatgtgtgataattatcacatctacttggctttaaacttatttttggtccagttttaaggttcataagttagtatgttgtgttgttttgtttgattcatgtatcctcagtatttttattaacacatagcatcagattaaacatgcttgtcactccaatatgggagatgctatagttacaagtgagtttgttcctctcaatcttaagcagtgaaaacaaggtctagggactgtgggatattgtttttattgctgctgattatcatgtctgtaatagacccgtgcatgcagccttccctctgcctccccctcatctcctcacaggtgggttatttacattacaaacttttaactcatttttgatctaggacatgcactgccgtcaggacggtcttactgatggataactcattctgtgtggtgttctgtgatgtagggtctgtgtaatgttcatcatccagagttctgcttgtcatcccctccccccccaacctgttgtttttctttgttttgggtgtaggggtggtcagaattgtttcccattccataatgcctgatgttattttcaagttttatattatcttaaggtgtatatgtttgttttcgttttatatatattatatataaatagatctattttacagtactggaatcaaacccaggacctagcacatactaagcaagtactctgccactgtttgcttgcttgcttgttttttttaattcttaaattctgtcagcaaaaaaaaagttttttttccatgggaaacagggaagctgctctcacaatagatgtactatccttatcattttttttccttttttgtttttgtttttcaagacagggtttctctgtatagtcctgactggcctgaagctctgtaaatcaggctggccttcaatttagagatcacttgtctctgcctcccaagcgctggaattaaaggcgtgcgccaccacacctgctttagctttgctatctttattctaccattttaataaaggtaaactaagttcctgttttggtctttgagacagggtctcatagtgtagctctgcctagcctggaatttacattgtaggccaggctagtgttgaactcacagagatctgcctgcctctggactcctgaagactgacagtaaaggcatgcatgtattaccatggaggtagctcattgatcttttaaggttcctcatataatttaatgtctttatcaagattttaagagagctctttacattcctactggtttgcttgagctatacaaactgccacttgagagaacaatagattattggtcatccaatatgcctatggacccgtataaactggatctacaaacattttaactggaccaggttggggattgaagtaattcattaaatgtgctctgcaaagattttgcttaatggttacattcggtagctatgatctaggtttttatgttctgccttcagagcagccatcagggctggtagaggagctattgttggtttgtgctgagacctgcacctgactgagaaagatagaagttgaggtggttttttcctggtgagcatctgtgtaggaatttaaggcatagtgttatgaatgtatcatgtcttcattagcaacaggaaaatatacacggtgtttactaaaattgtttactacagtaaaattcccttttatttttttagtagtccaagttcttgagtttttcaagacagattgttttctgaaccgagctatcattttaggaaggagagttaattaagccagaattttgtgtgtaaaaagagcattttttacccaggtgtttgtgtgttcctcggagagtgggagtatggtccaagtgaatccattcggtcactcccgtagcatgcccttgtagtttctcttgaccaaggatgaactagtcctgtgagctggccgtcagctcctgcatatgtgtataaacctcagatgttactacgttttatacctaccagagctcttcaagcaatagtatttgaaccactagccttttaaataaaactctgtcctattgctaacatgcagatatggagtccactgtcatttcttgccaggtttatttgtgctggtttaggggtaaaattgttaaaattgttggtcagtttttctttggttgacatcccagattgcttcagtgacaaactggttagtctttgtgtgtttttaaagacgtgaacagaactactttgccattggctaagggcctggcagccagcagagacactgctttgttttggttttttggtaggtggggtggtgatgttcttaggcagagtctacagtaccctggctgtccttgaactttggtgatcctcctgtctctgtctctccagtactggaattacaggcctatttcaccatgcttgacttattctgttcctttcccaacatttttcttctcttgagacagggtctcagtgtagtacagtctgtcttaccatgagctgtggatgcccttgaactcggtccttctgcgccatgtctctactgtagcaggttggagatgccctggcattgtagattaccattggcagtgctctggccaccatgtcaggtctgctaggattgttgaggacttctatccaatcctgatacttctgtcaaaaacctcacccagcaaaataagtcttgactagctagctcatggccagttctttaaagaattataattcattgttttaaaaagtcccaatttctgtttgcattttcaatttaatcacttaacagttgtatgctgtgtctgaaacctgtctgtgctaaggtgtgtgaatattgccagttttctatttattacagtgatgaagaaactagaaacttaggaaaggggagcacagccagctcctgactctgagcagcttgtgtgggaacaatgagtgggggcttgccagtgagcttcctctccgggaccactgcagcaggctgactgaacctccccaagggagcttgtgactatgctttggcaaaggcttcctgactagaatccattctgtccagtgctcatttaatataaaagtcaacatttcactgcaaacttact

SEQ ID NO: 34803 - DNA, 1186 bp, Mus musculus
gagatggctcagccattaagaacatttgctacttaattatgagaagcagagttcagatctagcacacagttgggtggttcacaaaacacctgaatctccagcttcagggctaggatgccctcttgtggctcccttattcactcttatgaactcgcaagcacatgccaacctaaagtaaaatgagagagagagagagagagagagagagagaaattaatttagcacatacctgtcttcccagcacacttggaagttagagacagaagtatgctgaaattcaaggctagcctggggtattcaaaatagtttttttaaatagatagatagagatagctgggtgtagtggcacatacgtttactacaatacttgtgtagaggcatgtggatggatctcttgagtttgaaaccctcttgttctatatcttgagttctaggccagtcaggaccaggtagtgagacctgtctcaaaaacaacagcaaaaacttgagtagtgtaacaaatacatagctgtacaaagaaaaatgaatctagaaaatgtcataatagaagtttgcatctgtgtgtctgtggacaacttataagagttggttctctccttctaccatttgagttctaggattcaaacttaagttaggctgtaaggcctttgcctaatactaggtcatctcgatggccccataaatgctttgttttttcttttctttttttcctaattatttgaggaaaagatagaatgcttgtggttgctgctgttgttgttttaataatatgaaacattgtgatattctggatttgttagaattgtgactatcttgaaccttaacctaatagaatgatcagtatgatataggtagaaattaatttgcagtcagctccagaaaaaagaataagctttaggtaaactaaaaaggatggatggtttggttacagtattggggatggatctctgggccttgctcataaagaatgttttatagtacctggtcagacagctggtttttttaggccaacaaattgtgaaaggaaagaaatactaatttcttgtttttcttttttctttaaaccagcataataggtttgttctggactgtaaagacaaagaaccagatgtgctgtttgtgggggactccatggtacagctaatgcagcagtacgaggtaaagcagagggtatccttgactccta

SEQ ID NO: 34804 - DNA, 1114 bp, Mus musculus
acatttctttttaaaaattatgtcaagccagcctgacacccagagtctgattcctggaacccacatgatggaaggagaggaccaatatgtcttccgacctccatactttctctgtggcacaagcttacacacacacacacacacacacacacacacacacacagtaaatagacaagtgtttttgagattcattgtgtctatggaagcatttctaatatcaagggaaaggggtgccaagcaaaactgtgctcatttctggaaggccccaccataggctccttcagtaaattccccagctggtggggtatttgggaaaggtggttagaccaggagtgcctttggagagtgaggtccctgggcctcttctgttcacaatgagatgaagagcctcctctgtctgccctgtgctacccaaacaccatgtcaagcagctggaagcttcttcccttatagcatcctctcagtcattttcgtcacagccagacagaaataataatccagtccctattggacttcttgtctccttccgcatcactcttgtctcggctcctatcctagcctgagatggccatttctgctacctaatgcataacctttacatttttattgttacttagcattagacatatatgtctgttatttgtatattgttgacaattgaaagagggtctagctttgttacccagaatggcctcagactcataatcctcctgccttggtcccttgagtgctagcattatagatgtgtaacaggaagcctagcctttcctcatttttataatgttccctccttccccgacttttgaaagtttctggctattctgagtattttctttttaaaattaccatcgccatattaccatctaaatgaatggttgagtgttgagatcttcctgatgttttgtgtgaggtggatctcatggtttcctctgagctgggtttggcgtgtgcctttgctgctctcatctcgtggtttatatcatccttcaagcaatggtgcctgcattgagaaagttatttccaagaaactttctggtttgaatatttcctggctctgtgttgagttaatatttttaatgcattctctaggtttagtgagaattgtcccccctaa

SEQ ID NO: 34805 - DNA, 1198 bp, Mus musculus
tagtagactgccaaacggccttccctagagctgggctgtgttgttgtaaataagagttcttactgctgcccgacttgcggcttttgcctgattagcctgtggggcgtggtcccctttcacatgtgtgtggtgttcctttcatgtgtagttctgaagtctgtgatcctgaacatccttgtataggtgtctcatcaggtcttcattttttattcctctccaacaaaatctcatagtgtttttccaagctgcctttgaactcctgggcttacacagtcctgcctcagtctcctgaggatctggaattgctcgtttatttattagggtttttcactgtcttctaaaccccattgtttcttactgcttctgagatccattccttctgtcccctaagtatactcttagtcatctctgccagatttttcgttctctcttaagccttacatctcctcttacccaaatgagctgtctgagccatctcgtttactgccatggcttcaccgatcccttttggggactgctcccaattaactgtctccaaattctctcctgaggtctagggccacaaatatccatccatttgctatttagcatctttaaaaaaattattttccttgttttgtagtactgagactcgaacccagaaccttgagtatgttaggtgggcaccctgcccctgaactacaacctgttactcagtgtcttcctttaacatcttgaaatcacattcactgaagcattttccaaaatgaactttattccctatccacagttttgctctatttggtgtccctggtgtccccgtctgaggcttggcagaaacaagtcttgattgtttcttctcttatcaccaccagagccaactggttagtaaaggctgtgcagtcagtctgctattccagtaaccatgctgtcatcttctcttgcctaagttagactttgtcaaatctgtggatgctgagttccatccttgtcttctccatgtttctgcgtgaccttggcagacacgaataataaaaactacacctcacatgcaaacctcacaggtacacgcatacaaacgcacaaatctgatgatatcattttatagtttaaaaatgtttcagcagtttaacattgccctaaagtttactgctaatgtgtctaaagcactgaaattcaagaatttttactacagccatgataaaaaaacatactttat

SEQ ID NO: 34806 - DNA, 1335 bp, Mus musculus
tcagtcgtgcacttacgattgtctgctcgtttttctctaaacaaaggcaaagaccacagctatgaatgcgcagctggtcctaaaggaggcctcgagtattagatgaacaagcacatgcctgtgaacaagggaagaaatccagatatagcacctgagcccgatggagctggaaagcaagatggaagaaagtcctctctagccaccgttctagggaagcctttgaaataagaacattaacaagacccttggcctcagtccagttaccagagttgagggcatcacagaataagctgtcaccctgagcctttccttcctgtctctctgcaggcagtgccagcagttacccctgtggatgaggagagctcggatggggagccagatcaggaagctgtgcagaggtaatgtggcacctggcagtgcttgcagaacgtccttgggcaggctcccctgcaaccagcgaaaggtcacctctgcccagggaggtggtgcagtgcagcttcaacacttgtgtggtctctttgctcaagccagatggcatgttcctccccacacggaagtaacagaagactgcccagaaaatttcatttctataagcgccattggaagccccttaagtgacagcaatacccttaagaacgctttctctcctccctccctcttccttgtccccgcgttcatattgcaactttggtagtgttcaggcctaacgcctgctcctccctgccacgaactgtttactgaaaaggagttggagattggagatgacagtgatcctagctagtctggccatggacctctggcatggactcatccgtcccaggagaatgaatgaatgaatatctcctgcactgtttgctgtgtgtttcctccactcccttgtaccaacactgagatattgggaagaaaaaacaaacatgggggttggggggaggggcagggacagttgtaaatatccattgtttgcagaaccttgttgagagatgcctgattcacagagcgacagtgaccatcaggtgtgctgtgcagtccgatggcctcagttccagtagccatggtctgcagctccatgcatgcccccttgtggagttgtctttcttattttctgtgaaggggttttcaccagaatccagcatgtattttcccagaaatacaggtgttcttcaagattatatgttttcccttgagggaagttgaaataaaatggttttcatgggctctcggggaaactgtgggtgtttttatcaatggacattaaccacagatggcttctttaagcaagtttgcatactacaaattacagtctgatgacagcttttaactgacgtaggcaatgta

SEQ ID NO: 34807 - DNA, 2034 bp, Mus musculus
cctgctggcctctactagaatcctatctggcccagcagaattccatcagatcccagcacaggccggatggcctggtgctgaaggtttgccatccagaatagctcagtgtaggcccctctggtgtgtggtccagttcccctccagtcaccaactggttccccctcatgagtgaacacccaggagtggtgcactgtgctgtttgtgtgatctccattcttattctctactgcgttgtaaaaagggccgttggtccatttgtgtgcacacgtatgagtgtgtacatgcccttccctgcggcctctttgtcacagacaagaattggaggctgtactgggtctcttaaccttctcctctccccagcatcctcggcccctatattttaattcttgatcatgtaggaattgtttttgataaatgttgatattattgttattattgttattattaataaagacaaaaaggattttgtttatttgtttaaaagagaaatgtttaaccagattctgtgctgttgaactgtggcttgcaacttctgtttgaagtgttttccttggctttggcatcgtgagccactctcctgtgccagcagcggatgcagtggcctcccttccccagccgaagcagcacataggcagtggctactgtccttgtcacttcctttctctctgcagtcagaaaccaaagtctggggccaaacgaggccggcccggcttctcttctggtcttcaaaaccagagagggatggtccctgctctgactcccagccctcatttctgagagccaggggccaccaacctctgagtatgcacagaagaaagccgctgcctgccatggcatctggacattaccagcagggtccctagccattttatccttccgcaccaaccctgaaagcttgcctctttgaacaaatccattgtctcttgaatggatttgttttcaatgtgagagcttggctggggacctgtttcgtggtcccatgtcctccaatttcccctccacttcaggtgtcactaattactagccagaagatgtctgactcccaagaaagcttgacaagccattgtcagcttccaagctcagtccagctctgatactccagccccgccctgctgctccccacgctcagcctgacctgtttacgtggtactggattgatggaagagcaggcaccaccctccagagccacccagacgaaagccagtgagcctattaaccgtgccatcttgcgaactattttcaagatcaccattgctttatattgtagtaaccaatatgcgcagtatatgttgaatgtatatgaatctactttgctatttctgttctttgaaaatgtaagaagtatttttcctttctcatttctgttgatctaaaaatgataataataataataatctccagattcaagttgctaagagcttttgtccttgtttgtgtgggacatctacaacttagtgacttggttggactgtaggaggttgtggaaataaaaacctgattatgtactaacgctgatatgttgtttgccttacggttcagagtctaattgagagaatcacatggggtaggggcagaggtgacccaggtgtctggagaagtccccagacttagggtggggcttggagcagcacattctcaccttgccttttggcctctgaacctggcaaatcagactcacactgtgtccaggcatccgtgtggactctaacccctcagaagggacacatttgtgtttgcagagttgggtgggaaaaggattccttggggtcctcagaaggagagccttgcattgaccctggctggaacctttatgaggtggcctccctcagctgtaggacagaagggcttttggtactgtttcccaatgtctgttcctggattccaggtggagggcagaatttccaacagggccccaggctctgctgaaagagctgaagtcacacgagaaaaaagatcaatgatctggggaatacggagatttgtagaaagagtgacagaggctggaaggatggctcagtggttaagagcaccaac

SEQ ID NO: 34808 - DNA, 1099 bp, Mus musculus
gttggagggttggggtgtggggtgtactgccaagtctgcagttttcatcctgttcctgacaggcagtggaaggtgccatcgcagagagaattgatgagttcattggcaaactgaaggacctaaagcaaatggcttcccctttcacactggtaagtactgggctactgcagccactttcagtgtaaggaggaggcgagcatcccttggcactgactgatgctggtaaccatggagcttggcaagtggaagaggtaagaagatcaagagtttggactcatccttgacttcatagcacggtataggccaggctaggctatgctgaagcccaacctaaagataaaaaagtggagcaggatttttctagtgtgttctggcgctggatggaagttatatatggtttatcttactctctcctctcttatttgtcaggtcattgatgatccctcgggaaacagctttgtagaaaacccacatgctccccagaaagataatgccttggtgatcacatactatgaccgaaccccacagcaagctgagatgctggggctccaagtaagtggactgattaagtcagagggatgctctggggctgccctgtgttctgggtcctgaagtcactgaagtcactttgctattgctgccaccatcatccaatgcatcctgtctcggccttttatcacgctcacaaagcaggtgtcagtcacaggaacccagccttgagccccgtctttctcttgtctggggatttgctttggcttctctatccatctgtcctttgaggtgtcctttggtaccttacagggaacaaaggcattctctccctctttaagtagggcagggctctactgtaggctgaggtctatctgccaacttgtggtttgggcctctgttctttcaggcagaagcaccagaggagaaggcggaagaggaagaccttagaaacgaagtgagtggtgctggctccctttgaagaccatagtggagttgtgggtagagactgacgaatgtccagtgtgtcaccatcacagctcacatgggtgaccacctgcgggatgtcttcagctcgaaggggtggggatgctcagtctgtgcccctata

SEQ ID NO: 34809 - DNA, 1292 bp, Mus musculus
gcaatcaccaactttggctacattttttataggaaggcccatatataaaagtacttagaactgggggttaaacacttgtatgcatgtacaggggcttgggtttgatactagcatacacacacacacacacacacacacacacacacttttgcagaatgtagccgtgggctctagagaccctgcaaatcctgtgcatttcttcggaggttgagagtcagccgtgggaggggatggcgggctgcacaggcgctgaccgtcgtctgtctgctcttggccctgcagaatgtgtatgcacctgaagacgatccagagatgaaggtcgagcggtacaaacgcacctttgaccaaaatgaggagctcgggctcaatgacatgaagacagagggctatgaggcgggcctggccccacagcggtagcagtggccagctcactggccagctacagtgccactcacactgcagggttatctgttactgtggggaactgacgaggagtgctcaagccctcgtccatggtgaagaggttaccacttgagttagaaatgtaagcacccaagattagcagctgacggacgaggcagctgcagccctactgtgctccttgaccttcttttggaggttttaaagtcggcgtgagaagaatcccagaaacaccaggcggtctgccatcaccgtttgcctgtcagctctctgacctccagtgctggacctttgaagtctggggaagtgaaatacaagtttctgctggctctgggcatgtgaagtactgactcagcagggaaggatgtcggaggggccgagcaggcacaggtgaagacgccacattaaagtgatggcctttaaacgacacccgcctctgcgttcatgtccttactgattaccatgtgctagactaagctgggtcacactgagtcacactcagctccgaggagactgaggacagcttgggccatgcagtgagagtccgtcttcatgaaaagaaatgaggaaggaaaaaccagtttagtttcctaagcaaatctttcttgaggtggctgctgtagaggcagcatttgattcactccaataggccatcctgtctgctctgagccaggtacacctgtgtggagtctagctgttctcatgcagcttaaagcagtctggaaaagcagggtggcacacacctttaatcccagcagaggcaggtggttctatgagtttgaagccgatttggtctacagaggaagttccaggacagcctgggctacacagaaaaaccctgattcaagacaaaacgaattcaaactggataa

SEQ ID NO: 34810 - DNA, 1106 bp, Mus musculus
ggcattaaaccttctttttcttaccataattcttcaaagacatatccttatcaatatgacctactgtcaagttaataacgatttgatggcaatatccaagagaaatgacacctttgtaatacaaatttggccagtgtattaatgcatggtatatggctggtattatccaagaagaaaagccgagttcatcagtttgagtttctcctggaattaggtggtgaatgcttcaagtatcctattttaaaacaattgcatctagattctgcctgcaggattgcttatttcattattctggtcatttgcatgaaaacaagttgatgattccttaaataacctgtcggttcggttttcttttcacccaggattgttattcctcaagtgccctcatccagtcatgcaggagcaggaactcaatcaaaaaactttgaaatttagagtaaggtagtaacagactttttcttcatttattttttggccaaaaaatgatctcccattttcatattaatttacctatgatttacacctctgtcctcccttcagcagctgggagcatacagagatatattttaatagaacatttcccaaagttttaggcatctaaaaaatgaggtcatcatcttcaagattttggcctgaacatctcatgaaggaagggagcgtgaaaggagacgtaggaaggggtcctagtatgtaatatcctcataatggaataacgatcaaagcgaaattcctttttcaacatttgtctggagcaaagtaatttgatttccgaaggagaagccctctgtttctgtatgtgtcaggtacttcctggagaaagtgtgctttgctttttacttgtttgtcttgttttattttagtttaaagtttcttaccagtggcttaaacaaaaggatgcttttacattcaaaacagcaggccagagagcggagctgtgtgctggcaatcatgctgtctaggctgtcccctataggtagtgatgaggagtgtgtgtctgtctggcattttctttcttcctatttgctttgggctcccacgagatgttgctgtggctgcagcagagagctggaggagttgagcttttccttcacttggcatatgggact

SEQ ID NO: 34811 - DNA, 1197 bp, Mus musculus
gcagcgcctgcactacactgagtactctgtaagcactagctgtcactgtcgtgggggagtggatgaagtgcctcctataaaatgttagtgattgtacttagacgtaattataattacagaagtgcaaaccagagtgtctagaagagttcactctgacacagctgtttacttcttaggcggggctctaatgctacggtaaagtgtctatgtctttcttagtttgagtgtccgcattgtcttagggacatgtgaggactctactttaaatgaaaaaaaaaaaaaaagacccaaaacaaacaaacaaaccccctgcagcctgggtatgatttctatttctaaaaactcaaaaccaacatcaggactacagcagcgttccatgtgccagaaagattcatccacacagaggcaggcattctggtggggtcaaaggtacagtagccattaggagaagggagttttgttaatttccttctttagaaattatagttttcctgataggattttcacgagtgagacaaacgttctgttggtgaagttcagtggttttcttgtgggtttggcaaatcacctgtaccaggaaccctttcctgattgcatggagatgagactctggttggcttcaagccttttccttgccaacagtcctgcctcatctcacacaatggagaactgagaacacaagattgaccctgtgctgtttatagtctttatttataattttctctgcagcttgatttttttttcagtgagaaaagcattttttttaaatgtggaaaacctactaaaatgttggtaaatactagaaatgggattaaattttccagcattttgaattaacattaagatatggatgtggctcttcgatagataccatgtatagaatgttcttgtagtccttggggctctacctcacaaaatatggggttgcattatgaaatttgcatagcatcccatgttttctttgctcatgtttcccccaggcatttttctctctgtcctctgattctctttcctcctttgcatttttttccttcgatttcaagtgtgttacaggcaggaggaaaaagtccctttctctattaaagccacaggctgtgtatgacactgtaatgaaattagatactcagaggaatctattcacttttaatttctgatggctataatcaacatgaaaagcttttcttaataattaatgtt

SEQ ID NO: 34812 - DNA, 1174 bp, Mus musculus
ttaacagcgtggtcagaaccgcagaggcctcaccagctgacatgccaacatgggctgagaaaaatttcataaggtcccacctgtaggtgaagttatgaacactctttgtggttgctgaagtgggagagaaccagtttggttatttgtttgtttgcttggttggttttgttttaggaaagcaccccagtcctaagtggttagcgccaaacacatgcaaaacatgagaatgctagttggactctgaaggtgtgagtgtctgtgtgtgtgtgtctgtgtgtgtgtgtgtgtgtgtgttggaggacatgagaggtgttggagcagcgagagaaagggtcaatgtaaatgcagtgtattttctggaaacccttcagcaactcagaacataaaggacaaaagtgaggaggaagcctatgaaggtggagtctgcatcttgaatgaccgtgacgtcaggttcctagtgtgacctctctagctgccttgtttcctgtggactgcagtagctcagagcagacagctggccagccacagtgcagctgtttattgagcaaagaggattgtcttcctatttactttgactcgctatttttggaaggaagttgatgttttttaaaaattgtaacattatatggttagaatagagaaagaaggggaaagtgctcacaaactatgtcctgagggggctgtccattcttttcatttactaagttgtgtttctaagtgtgatcggattctgtaaacatatctaaacactgcttgttgttttgttgaatctacacagtacaatcaagttaatgggtcagtcagtttaaaacaagagtactttcagacgtgttgtgctcatcaacagcactgtgtcagacatcgttgggtctcttttctgtatacacctgtgggatggtcacaggaacaaggttgagattagcaatgcagtggatggtattccaaagtctctagaccacatgggaggggagcttaagcacaaaaacaaaacttgtgtttgaagcagccgcttttgacctaggggaacttgtagcagtagggagagcccctgaaccatataagaataagttgcactcctcaagcccctttgcctacaaatacttcaaagtgtatttccaaagagcgccatttcctcctctatagtaccgttattagctttgggcactttaacata

SEQ ID NO: 34813 - DNA, 1128 bp, Mus musculus
aggaatttgtaactatcgcatgatagatactccctaagtatttatgaatgttattacaattccccggcctctaacttaatatcatggatcttttggggctctttcccagttacctcccataaggttaatgattataattttcataacattttttgttcaaagtccattcatttctaatgtgaacattaaacattatgaaatgttaaagactcctgtcttgatgaataaattctcatctttgcattgccaagttgtagttgagatttctgcatacccagggagggctttgattgaagcataacactagaaagcatgtgatatataaacacacacctcactaagaaaaacgtcacaaggtaaacacacaagtgaccattattcaaatcaagaagtagaactttaccagcaccccagaattctccctcatggcttcttaaaattactgcttttcttctctttccaaagataacccagacttgaactttaatgctacagttgtgtgtttttgtttttgacattttaaatttccttattgtggaaaatgtcaaacatacaaaaacagaaggacttgtatattgagccctcatgttcccttcagtcaacgtcaacaattattaacttgtgcccagtgttatttcatctataatatcacctgttcacccaccacaggtcactttacaaaactctagaccttataacatctcatctataagtatttcagtatatacctctgaaagggaggctctgtatagaaggtgaccatagttctatattcatacgtaaatagacataatctctgttcatgccaacaacatttagccaacatctaaaatttttatagttatatcataattattgatctgaaaacatattttcgtttggttgaaccaaaagccaaaaaaagtccataatttaactactgttaagtatgtcaagtgtcttttaacttatagtttctaactccaccttccttttcctgtattatgtatttgtttaggaaactggacctgtcctgcagtgttgcatgcagtctgattgtgtcctcctgaagctgttctgcatatttctttgttttgatttcctgcaagtcagatgtctattaaattcagatttaattttcactttagt

SEQ ID NO: 34814 - DNA, 1201 bp, Mus musculus
tgggcttcatatgcccctccacatgataatcctctagacggagattcatttagagcaccccaaacatcacttagcagagaatgaaaagcattgttgagccaatattgttacctttccctgtaagcatatataaatagctacagctgaaaactgataaaaatttaattttcacgattgttctctgttttcttcttctaatgaaaagccagagatagttgagtaaattctaatgaaactattatttactttggtacatgctagcattgatctattatactactctgtttattatgtatgtgctgtggtgattgattataatgctgttttaaaatttccagagcagagagcacttgttctccaatgtgaggtgaagtcgggaagacagacagccactgagatttgcgccacttgagtccagtgctgactgtgacaggcatctaagactgtggagttacctggatgggtttggccctattaaagacattaaataaacagaagcccattctgtattttttggtcaggttctgatgtgtggagcccgtgctggtctcagtcaccaggcagtcctctctccgtagcctctcccatgctggggctgcagcctctgctccccactcccctccctcacttagtttttaaaactttctgagctttaattgggtcttaggtagccgaggatgacctggaatccttgcttataaatgctgcgattgttggatcttgtagttctcgttacaggatactgtagtgtagctcaggctagtctcaaactttcagtcctcctggctccagcatctaagtgctacagttacaggtatgtacgtttcacttgctccgtttttctctattctaggaaatgtgtgggagctttaaaaaaaatggtgccgacaatgttaattgggagggttttaggattgagtactgatgaaatgttaggaccacatttgaaaggataagttggcttagaaatgagtttacaaagtaaacaattggagaacaggaggtttttgagactgaggtgaacgtgtaagaataaggggcacatcttaaagttgactaagcaggcagggtcacagatgtatttaaaatgctgacatgccgacccagggtcatttggttttggtctcagtgagaggtgtagatccccaagaacggcagcctttccctctgtggggtgagcacagccttcagccttcctagt

SEQ ID NO: 34815 - DNA, 1611 bp, Mus musculus
tatacagagcaatgaaaagaatacagattgaccaaaaatcctttcacttttccctccagccattttcccacctaaggttccttgataagtaatcctgagtttgtgaaacaggcccagtcaagtcactatctatgtaactccaaagtatctgaggctaggtgaggcacacctgtccaagtgtgatccaaccctggagcacccatgctcctttcagagaatccatgaactcaacctgatcctgagactcctagtgtgtcagtgtccgtacagaagcagcggtgcagtttacacgtcactaacccgagtcatctcagtggcaccagactgtcccaagattcctgtgcttttcacacacagtacaaatgaatgtcccgatgaaccagaagagagtgattacttctatcagctcttggcctgtgtgtttctagaagtttatgaagtcgaggggcacaaaggcttccctggtcatctgggaaggagcgctgatgtgtttgcgttgtaaatggaactaactcggaaatccatggaacatcattcactgtttctcaatagtgataaccaccctggctattaaggcatgggtgttaggcagatgtttttggaaaataaaatgagcctgtcgtttctagggaataatgggcgatgtgtattgtcagcaacaacattcaagctttgaatggaaaataagaattattaaaaagcttcacccaccacttcgcacttgatagattttctaagacgtagagacaactctcctgagagaggtggccatagtgatgccatgatgctgagttatggaacatgccagaagaactgtgcagcccagtgaatggctgatttctaaatgactatagtatgatgctaaaattcacaggtgggtaaaaaattcatggacagaggtgcaacagtggccagctgactgacttccctgtgaccgcatggaaagttccctgtcatggcttcaggtactacaccctgactatccattataaagccaacaattgcggatttcagtctagcatcagtacccatcaccatcaccaggaactactaagccctcttcccggttccaaccacatagctgtgtgaggctggtgctttttatattgctgaacacaaacagctcatggcaacaggctaaaacggcaaacatgggaagccaggtgtcttctagtaaaccaaacactaagagacttgccaagacttcctttccctaatctcatcccttggaaaatgtagctgtttgtgctaaaatgtctttgatagcatgtaatggatttgttatatcttaattggattagtaagaatcaatttcttgttttgatttctaatgtgatgacagtctatatgcatagcccaagtaaacaaatttctttgaggccctcaattaactttaaatttaaaaatgactctgacccccaagatgtgcaagccacacctctaatgtagtcctgttagatttatgattgttctggcctgccagtgcgtgagagtgccatctgctgacagaatagggaagtacaggtgctttttgaaaagcacagctggaagtcttggatgatttctgaaacttcttgttggaaatttatcaagggaaaaagacatcaactc

SEQ ID NO: 34816 - DNA, 1197 bp, Mus musculus
cacttgtccttaaaagccacacaatgtagcaaaccttccatactaagcgttaaaactagtatcttattcatgctcatgtctgatgaattaatatgggttttgagagaacataattttccagggacttctgagagtgcctgggtttaaggaaaaaaaaaaatcaacaacaacaacaacaaaaaaactgggtccctacagtggcttcatagtaaagctacaagggtaattgtgtttgtgtgtggtgtgtgtgtgtgttttccgaagtatgggcttttgtggtgggtcaaaactcccaatagaaaatatcgttgtatttttagttggtgttgctcaggcagaggacacaggaactatatccccccttcaggggggatgggacaactgcagtatttacatagtctgttctcattcctgtttggtttggtggcattttgattcacttatttattttttaactagtgtgagatttgtgtttgatgttccatggcatctgtacaggcgccataacacgacagaggtggtaagtgctctcagacaccgggcgggcgggcgggcgggcgggcgggcgatggagattcttaagtgaagcagacttctcacgcactgtcctcaggatgtgtgtggacctgagctggcacatagcttctacccagcaccgccctcgtctggcttccctcattttctcagaacaaatcaaggacttttggtagttctccaggacataaatgcatcgtgtcccattcggtcctattgtggtcctatctgtcacagcaacactaattataaaaattgaacgtaaatttgtgctgtttaataggtttgggtttaattttgcctcagtgggaagacatttgattaaaagagtcttttttcccctcctccttcctccttttttcttttcgtagaacagttagtaaaggcgtaggaaattgatttcagtgtcacaaaggacatttctgacaggaatgtactttgaaatgattcaaggcatctgtttctctcaaatgtgcccaacactgctgagagctgtacctaaattaaactgtttaacgtgtcagctcagaatccgatcacaatttacatcccagtggcttggctggagtctccaccatttcatgaactccctcccctaatttactaaacaagttctcgctcaaagtgaccatttgttctagatgccaatatgtcacggtcgga

SEQ ID NO: 34817 - DNA, 1150 bp, Mus musculus
ccagatcgccctgacctatgacgttgccatcttgttacctaaggtaacactgttaggggtggggagaaagggaaaggatgatgatctgctttgtctcccgcaggcaaatcagaggtggaggagtggtcggacatgtacactgtgaccagtcagctgatgctgaaggtgcacaaggaggacgacggggtcccggtgatctgccaggtggagcaccctgcggtcactggaaacctgcagacccagcgctatctagaagtgcagtgtgagtagccgagcaccttgttttgaggcctgtgcttggaagctccttcccttgaagtccgtatgcaatctgtatggtgtacgagggttgttcctctgttgttctggtagaagagtgatcaaaagatcatcctgctgaagggctactgtaataccaagtgccaatgagaacgtgaagatactgcggccaactcaaacatgaagctaaagcagtgccagtctgctttaatgtggcttaaaatcggcttctttccgtgttcactgtcatcattcctgggccaacaaagtcttcagtgattccccctccctctctaatccaccgtaaaccggatgtttacaattttattcccatttcttactaacattttgttctaaggtttatgttctatgtagctttagttagaaaaaggtgttgaaagttaaagtcgatccgtaattctgcacggtagcgagactgtccctagccatcccctgtaaaccagagaagagggtctccttgtcttctcctccaggcccttctgcttcagaggcagagggtggagggatctttccgtccaaagccgtgctccatccaagactgtgaccacatgaccctctgctctcacttttctccagaagattcctcctgtaggctggcctgtggcggtccgaggatacagtggaatgggtctagtgggtggtggtgtgaggatttgggtgggtgagcagtgattagggatctgattggggaaaggcattgccaactgtgggagttcttatgttagtgccttagggctgccatgtcaattggcagtgtcacagacctgtcccaaaaccacagagatccactcacaattctaaataccaaaggagcaaattgggggcttatttgggccaccttccctccaag

SEQ ID NO: 34818 - DNA, 2292 bp, Mus musculus
gggttttgggtttttttggttttttgtttttttcatttatatttcttcctaccaagtcaaacttgggtacttggatttggtttcggtagattgcagaaaattctgtgccttgtttttcattcgtttgttgtgtttcttccctcttgcccatttatttttcccaaaatcaaatttgtttttttccccctcccaaacctcccattttttggaattgacctgctggaattcctaagactttctccctgttgccagtttcttttatttgtgttaacggtgactgctttctgttccaaattcagtttcataaaaggaaaaccagcacaatttagatttcatagttcagaatttagtgtctccatgatgcatccttctctgttgttgtaaagatttgggtgaagaaaaaaaaaaaaaaagaaaaaaaaaagaaaaaaaaaagaaaacactgaaaactctttgctgctgcccatgtcttaaatacgtagagcagcgaagactagaaacgtagactgtgacccagacgctgtcgtctgctgtggatcttcattactgtacagggttatctgcaagtgaggtgtgtcgcaatgagattgaatctgtcgttaattctttatctgtaggcggctcagtatagattaccccacgctgtgcagaaagtttttggagtggaaaggtctcctccttcctcgttgccctaaacagacccgacatgtgaggtctgtctgttttatgtaagtggacaaatttgagatgtcacaggaggggaagcagggagggggtacgacagttctgctctgattatttctactctcaacaattccatccacctttcccaattggccttactgctcactaatgcaggagagagcaagtccgtgtgccgtgtgactgactggaggggacaggctttgtttaggttttttttacccccactttggttttggttctgggttgttttgctttgttttgttttcctttgttcttattaaggacggcagtgggctgtgtcctgtgtgtactgtatgttacagacaccgtcctgctgggacacttgtcctgctgggattcccagctcccacccccaactcctctcattccttcagatttggcttgacaaaggcaggaggtacaaaagaagggccaattttgttctggaaaggtcagagcccagagtcgaggtgggaaagtggcatatagggatttccagttacttaatcaaaactcaaaatgtgagtgtttctgtctttcgtgcactaggcctggcctcttacctcagccttaagaaccatctgccaaaaactactcatctcgcatgatggcagccagagcgcatagctactaaaataagtttccgtgaacatatcttacaccggagcctgaggaaagatagaggcgcaaaggaaccctttgcattctctaaagctaagtgggggtttgcagaagtgctggggtcatctagcagtagttctgaaggacagaacctaaactcttaccacacgtgtcggtaagctccagactccaaaacagcccctctggaaagatggcatcagaaaagatagatctatctatatatataaatatataaatatatattatatataacattttcagtcagtacttttggattttgcaaggtgcatttttactattgttacattatgtggaaaacctacgctgatttatttaaggggaaaaaagtgtcgactctgttctttgaaagcgtatttctttttcttgtctttattttaacttctgatagaaccactgcaatatgggggccttttgggaacggactggtttgtaaaggaaaattcattatggagcagtgttttgttaacccctctcctgcccctaggcacttaaccaagacaaaaagccacaaggaacatccctttttcaaaaattttataatgtgcatctattccgagcccttagcacccatcctgaccatagtgaccatatcaaagggtgacaaccagttagcatgtcgttgaaagggtttttcagctgttctttttagaaaaaaaatatatataaaaaatatttaaaaaaaaacaaaaaacaaacaaacacaaaaaaactaccattgttcacagaattggcatctcattttcgggaccgcccatctttctgttttgacaagtgtacagtagtgcagtgttctgatgtaactttatggcttacaatgttgacatgtctcaggttcctgtgtttcaattggtgtttttccgtctcaggtagattgcaaagtgtaggccccacacattggaaaaataataataataataaataata

SEQ ID NO: 34819 - DNA, 1200 bp, Mus musculus
catggcattgcattttgggtagaggtaatagtgaatgcaaaagctgtaagggggagttctcctcgccatgtttgaaaaatagccaaatggcagaataaatggaggagaatgtgcaggagccaatgtcacaaagatagtggaagtggaaaggggagatcacatccagccccgcctgtccctgtcagccacagtaagaaagatggcttgaaataagggcaggaagaagatgggagattgaaaaactccttgatgtgcacgtgtgtgtttcttagccttttgggatgctaggtgaagtcccgtttggagccacttacagatgagctgtcaagatttgagaggacatccttcacctcacaaaatgccttaaacatcacaccacactccctcttaaccataaaacaaaggacaggattgaccaacagagccatcatcccatataggactaagaatgaaggcttctcagacctacctacaattctggcccagcccaaggagagccacctggctggtatgtgtccgaggacatcctcacaagaggcccagcagtggccagctccatgtggaggtagagtgcttgctatttttagaggcgggcaggtcagagcatccctgtcccctgttgataccactgtcctttgagtgccttaggtagcacaggctcaggggggtgagaatgtccacagctcagcctacttgtgcatggctttggctcctccaaagacggaaaggatgggctttgaccaacccctggaagggaactttggcttcttcagcatctgtgaggtttgaagatgccaaatgtctactcctgtggaaaatctcacttgtgtgtgtgcagtgtccctccagagtcctgagacctgtttaggtttagtcattaaacagcagagtgtgacctgtgaatgttcggtgtctaagacccatgctgtgccagccggcctggtacctatgggagttttcacgttccggtgtgtgtatgttttacttttgtagcaaggaaggaaggagaagagctgggacatcggagaatgaacaaaggggatgagagacagctgggaagtgtggagaaacagaaggacaaagggtcagagagaaggatgcagcattcatctccagcagtgaccccctgagcagtgagaagaaaatcagaagcttcatggaaaaccagcccaccttggtgaaaacagagaggtcctacac

SEQ ID NO: 34820 - DNA, 1199 bp, Mus musculus
ggacaccttagtcaggattaggctgctttctgttgttgtgaccccaactataaaattatttttggtgttaattcataactgtaattgtgttgctgctataaatcataatgtaaatatctgatatgtaacccccgtgaaagagtcatttgacaacaccatcatcagcccccagccccaccccaaaggggtcaagacttcactggctgagaatggctgtcctggagcaccagcttgcttcttctctttcattcacaggatgtgactacctccaaggactgtattccagttccccttcttccccctccccttccccctccccctcctcttcccccttcctcctccccctcccctcccccttccccttcccagttgcctgcctgccttccagcctactgtcagatgttcaggaagtcttcacaggaccattatggagttgggttgatgttactgaattgaacctccagggtttctcccaactacctttctacaacctcttctataacaccccacccttcctgtcctcagttttgtctcctatttctccaaagatggatagcactctccacgtcagggcttccatcaaccaagaagcctcactggaacctgtgtgcctgccctgcctctcttgcctgagactgtagatcttgagctgctaagagacagtggaagggaagggcaggcggtctcattcccctccctccccccacctccctccagcgctccccggagagaagctgagagaagcagtttctcccaaccttagcatcgggacaggtgggaaagcagcaataatccaattaaagtgtctgacactctggccaggtggcgccgtgctggggaggaggtggcacacgggggctgttacaggttgtgtttcactggctgtggatacctacagggagaacacttgccataagattcgcagataaaaaccagtggcctctgctttctctccagagtgtttttgtcagaaattggtttggggcaggaggggaagagatcctttttctttcttttcccaccttgagggcatttagaggtggtagaaagaggaattgttggagggaggaaaggaataaatcaaagagccggcatgggcttggttagaaaagccaagagtgtctccagcagagcacggctgctcaggtgggaggcggggcctccacacgcccgacttagcccttccctctgccaccctt

SEQ ID NO: 34821 - DNA, 1148 bp, Mus musculus
acatctgcgttttatatttttatttttgtcttaataaggttatttttcaccatctcttcattctcttctaccataaaaaaatgaaatggtagctaggacaggtgaaaggcagaatgtcaccatttaacaacaggaagaaccaggagaaacttaagccagggacagtgtatactttcatctgcaaacttattccactgcgcagggtaggatgacagtgaccctggtcccttgtgcctttgatataagatctccatcaagttactgtcactgaggaacttcctttgggtagcagtttctccctccccttatcatttgaagaaatttgatgttgggcctatgtccgggagccatttattaatgtcctgtgtgtttttgatgtatgtagtctgatattctcccatatctggggcagtatcagttcaaagggattctgtggagatcgtggcaatttgctggaacttacagcagagacagtgctagcaggaaacatcctctccttggtaaatggggatgtcttattgtggaaccatttgatggccgtgttgggagcccttatcctgttcttcccacagcgtgggtcaggtgtattctccctcacatgaagaaagtgataacatgttcattattgagcatcctaataaatatgttcatatttcatttgaaaaaaaaaaaaagaactaaaggtaaaagccaggggtcaaggtcaggacacacccataatccagcacccacaagggaggctgaagcgggaggatcgctgtgagtttgagaccaatctgctctgctaaggtcagaaagcagatgttatccctgattttggaattcccagacatcaataaaaaaataaaagcaataatctgtgtttacaggggctgggaagacggctcagtggttagggtaagtactgctctggcaaaagactgaggtttgattcccagaactcataccaggtggcttacaaccgctttttccccggtgatccagtctcctcttccagcttccatgggcactgcatttacatacaaatgcccacccccaccttctaaatacacacatacatataaatacaaatagaaatatattttttctaaaactgtgtttcgggaactcaatttaaagcattttgttacagtagacgcaacagataa

SEQ ID NO: 34822 - DNA, 1181 bp, Mus musculus
actattgcatagtggttcccagactttgggtcttgggctgctgctgggaagttttccatgaatgtgtttggttccattgcagaaatagtgtatgtgtagttcaggctcttcttaggaattcacagaaccgggttaagttagtaaacgctttgcagaggacgttagagagggagtggctaaccgatcccctccacccgagacatgcgccacagtcctctggacccgtgtggggatttctgatctacttctaaaagagaaaacaaagccgcaccggcccctctccacaccagctcgaggccactgcctggctcctgggtgacttggaacaagtctcggttttccatctctggggtttggggtattttttttttttcttttcagtgtggtgtgtttgcttgtagggcactggatgacattagtgaaagcatcaaagagcttcagttttaccgaaataacatcttcaagaaaaagacagacgaaaagaagaggaaaattatagaaaatggagaaactgagaagcctgtgagttgatgccggttctcaagccgcagagcctggctctcagaagccacgttagcgtctctctctcctgctgatcgctcgacacagcaccttttctaaagaaaaaaaaatcttttttccagttaactttgcatcttcatactcctcaagcagacatcactcttccgtttcttctaacctgctgtttctgttctgacagcggctcctttgtaagcttcaggccacacccaccccctcagtccatatctgcacttgctcataggccggttccttttatttgaataataaataaagctagttctattgaaatgcaacccttcggcaccctctgctctttatcacacagttgttgggtacaggtgttttttaagtagtgtggctcaggcttaaattactcagaatgccattgatgaactaaaccgtgtgtttcgaacagggagtaaacttaaatttcttttgctttacccgtgagagtggagggggaggagctaggttgtaagatttgggctcatcattacccagctaacaagctctgggatagaccactctccaccacgtacaagaaattcaggtaagcacacaggggtatgtagggggtggtccctagcctctgttagctagagaatatgtgccaggcagtttccgtgttgtgtttagag

SEQ ID NO: 34823 - DNA, 1706 bp, Mus musculus
ttttcttacctcagatgaacagtgttttcagacagatgtcatatgctgggaaatttggttctccacatgcggatcagttgggattttcaccatcagctcaaccacatggccatacctttaaccagtcttccagctcccagtggcgccaagatgcactgtcatcacagcgtaaaagacagaattctcacccctacctagcagatagacactatagccgtgagcagcgctactctgaccatgggtctgactatcattacagaggcagccgagaggatttctactatgacgacaggaatcatgatggctggagccatgactatgataacagaagggacagtagtagaggtgggaagtggccctcatccagacactaacaagcattccaaggacactgtttacagggccattttaggtccttttaattaagttgttggagaaatatttctaaaagctgtacagagtaatcccacaattttccacctgtctttgaaaaaaattttttttaaacctagtaacagtttgacagaactgagaactgtggctccttgtgtgctactttaattacctaacctcaggggttctgaagaggaaggttcatacaagagtgtgtcaccatcccggccatgtcagacagtctcagaaagatgaaacggataggttggttgtattctaaagcaaatattttaagtatctcaccttttatgttgcaagaaatttcatggtaatgaatcaatttggtatatataataggaaacatctaagttggaagtctgaaatggctgtctgcattttgttaataaatgagaaaatagaacttttcagtcatctgcttattaatagtttatttaaaacagtttattggctttgtttggagataaatcatatttcctaactcagaatttaagtacaaattctgtggtatgctcttgaattttaccacaattgaacatacattataaatctttactagttcattctaagaactttaaaattctttcattatatttgatgtatgactagtcgctcaggaagttaaatatctcaatgtatatttttacacaaaatgacagtgttggtgaaaattcgttttagaatgatgttcatacatagagaaaatgacagtgtttgactgcaaggattgtaattttgaaattttgtttaacaaaacttccatgtttcaagatcctgttgctctttgactgcaaaactgtttctaagaattcattccatgaaaaatgtggatcctctttataccacagcatttatactatgttccttttaatatattaaatacacaaaaagagaatgtgtctctttattttgacgtcattgacatcaaggccatctgagttagcagtgtacttttaatcatgtcagttcacatttttgtaaggttgcccatcttacagcatcttctgtagatttgccttgatgcctggctagactgctatcaacataaaatatgcagtagagccttgtgaacattagttcttctgtctgctttttatacccagatgttctacatgtccagtacttgtactaaagttccattaagtagtcatcctcaattgattttttttttttttttttttttttttttttttttttttttggttttggttttggttttcgagaaagggtttctctgtgtagccctggctgtcctggaactcactctgttgagcaggttggcctcgaactcagaa

SEQ ID NO: 34824 - DNA, 1100 bp, Mus musculus
gaggtgggcatgcccacacatacctgtagtcctagcgctttggcacaggaaccaagagggcggccacaagtttgaggggaacctagtttacgtaatgaggtctagggtggcctggactacagaattgagaccttgtctccacaaaaccaaacttgatgaggaaaatgagtttagttttttgaatatagtaagtcttcagtgtcagtctttgagggagttctgatataccaattcacatcccatcgttgcttttgtaatttcttgacaagaattccttagcctagtgtgaatcaatgagaggccctctggtgtttcttgtcagtttctgtctgtgtgctgaagtccgtggtgtcccctttcccatgcctcagttctgtcgttaacaggcatttcatgaggagtactccaggctctatcagcttgccaaagagacacccacctctcacagtgaccctcgccttcagcatgttcttgtctactttttccaaaatgaagcacccaagagggtagtagaacggacccttctggaacagtttgcggatagaaaccttagctatgatgagaggtgagaatgtgccagcctgttcctgtgtggggtcttactcggcaacttcctccaatatggaggagctgccctgaaccctgccattgctttctgaactctgtccctcacagatctatcagtatcatgaaggtggctcaggccaaattgatggaaattggtccagatgacatgaacatggaagagtataaggtaagtgtggggctttgtttctttttaattccttccaaaaccttacttctagaggcaagtgattcttaagataaaatgaagttttatgttaccagactcaactagttccctatgaacttgaaaggagaaggaaaaaaaaaaaacaaagctgagggtggtgggccacactttaaccccagcactcaggaagccaagagtaagtatatcgttgagttcaagcccagcctggcctacataaggagttctaggacagccgagatagagattgaaaggggaaaaattgccgggcattggcacatgcctttaatcctagcacttgggaggcagaggcaggcagatttctgag

SEQ ID NO: 34825 - DNA, 1932 bp, Mus musculus
cttggcactgtttgacagtgacttcatgtatattgtgtgttttgaaccaagactgcaatggtgtcatggttagatgtttggttttgagtgagtgagtaccctttactgctgccatgacaaactctttccccaacatacacagacatggacatagactgagttatgcagccctatgtgggcttcttgcctagtgtgggagggtgagttgcaaaggcatcttcctcttagctgcagcaggatgcctgctgttgagttgaatgttggcccctgaaggccctcccggatgctatagccttgtttagctgtgtgtatgacagttcattttccctctacagagaatctgcagctgtgcttaggagagttcctacccaggcttctagatccttctgcagaaatcatcgtcctaaaggagcctccaactattcgaccgaattctccctatgatctttgcaaccggtttgcagctgtcatggagtccattcaaggagtttcaacagtaaccgtgaaataagccgctcatggacagtcaagactcagtctggtctccggtcccctgcctgttatgtggcagtctgttgtgacagatttccctggacagagggattgggtgtctgagcgagattcagaccctcccccctctcgtgatgtgtgtttaagggattaaggataaagttgcacattttaggtacagaaccacaagagctatttcactgaagaaggcaggagccagtgcattaaggttttgaattatcctagaagacctgaactgcctttgtaaatctcccataacacttgggtttgtctaaacctcgtgccacttttaaattacccttcaggcaccagtctttgacagcaaaagggtgactcatcagaactgagccaggggagcagtttctagttattttgtcaagttcaggtgacatttaaaagtcctcagctaccagagattggtagtaggggtcttgcctggctcttgccagtgatgaaaagaggtgctggtgagcccttccttccacataaggctgcgccatgaagccgccaagggaaagctgcatccccctttggtctgtttatactttagataaaccagaaaacctcacattcagtcttgagtgaaagaaaagaaagcatcctgggcttccagccctgtgctggtgtgacagatgccacacaaggaacacttaatagttaataatcatcagaagcaggtgtctaaggctacccggcctaagagaattttgatcctttctctcccttttttttttttaaagaaaataagggatgtgaatttgtataaaaaataacatctatctgtgtatatgtagaaagaagctgctttttaaagaacttctaattggaaactcatgttttaaccaaattttaaggattaatggagcaatcatgggagggaagaacacaatacaactatgcaggttttataaatgtgcaataaaagtatttgttttacctttggtatgtagcatgaccctttttgaaatacatgttttctattttggaaatcagtggacttcatcgaatttatattttagcctttctatttaaaagggtcacgggagaaaacaaaagatgagcaactttctctctcttccccctgacttgttttccaaaggtttgtttttacttatgtatgtgtatgtaatgtatgcaagtgcccaaagaggacagaagacgaggccccagagctgctggagtcttgagccacctattgtgtgctaggaaccaaactccacttagcacagcagttcttagcctgtgagttaatgcctttgggtggtcaagagactcacctaagaccaccatcagaaaacacatatttacattatgatttataacagtaacaaaattagagttatgaacctaaccactcagccctgtctttgctctgtctgtattagtcagggttctctagag

SEQ ID NO: 34826 - DNA, 1815 bp, Mus musculus
gagtgacactgatgaagaggacgctaagccaacagacgtcccccgacagcacgtgttcctttcccaagtacaaagtgacaagaggttagggtggccagacgcacccgtgttcactctgtgggccacatcccccagggttctgacacttctgcagtgtgaccagtggtgatgctaggttataatttcaaactgtgaaaaataatggtctcgtcctttactcagtgtggggttattttgcattttctcagctcccggggatgggaatggaggatcccagaacactcagcccagcccagcccctttcattccagggcctgcacagatccacagttcacgtacacgggtcctcaggaagagctatcgggtagacaactctgagggcacttagcagaatgggagagctgggtagcacccgagccaggtccttgcggtgaggggcagactccttgggccacagcctgttccggggaatcgctttcccatatggtgaagtcggcggctggaccggctctgccgagggcacactgtacctcctggaaatggtgtactccactgtttgtggttggatacattgagctcaactctgatgataagaagagacagaggtatggccaactccaaaataatgtggcccagagtagctgacgctcagaacactggccacacatttgctggaagccaagaccgcccacactttgatatgcctctctctttatacatatgtttgtctcgccatgcatgggttttcctttcttcctttttctgtttctttttatttttaaacagcagtagtctctctgatatcaaagagggagacagtgtatccccccctattcttttatgtgaagaaataagtatttagttttctgtagggttttttggttttggggggggggttgtttgtttgtttgttgttttagtttttggaaggagggatggactccaccagtgtcagtgtcggtgtgtcttatgtctatgtggcatacattgtatcacataaagaccagcatggccaagttccgtgggaaggttacccaggtgccaccagtggggtctcccagtcctgaagggccaaggtgtatccaacaggattctatgtcctcattttctatggaacctcccatgtcccagggtctcaccctcagctgtccgtctggatggtggtgatcacacctccattaacatccttacccagcattctgtacttcgggggccttctctcttgttataaaaactttttactgagtgaaacatcaacaccacctttgtttccattctcactgctgtaaatactgagtactaactgagaattttgactttgcattctgtcagaatacttgtgttcaataaaagttgaaagaaaaaaaaaagcaactctagtccaactgggctttctttctgctctgtgagagtagtgtgcaaataaatataggcatgcctgcgttctaggttttaggttttctttggttggtttgttggttttggggcagagcttgtggttgctttggttttagcacttagtaatcgacattagtgtgtctctgacacacgtaatagctcagctctgtaatcctagtattcagtagactgaggcaggagaattaccatgaatttgaatttaaattcagttcattgctgtgaactacacaataacttccaaatcagcctaggctacagtgtaagatcatgtctcaataacaacaacaaccaaagtgtatgtgtgtatatgtatgggtgtatgggtataaaaccatcttgagttcatgttgtacagattggtagagaggctcctgtttaaaaggcccaaacctgaga

SEQ ID NO: 34827 - DNA, 1355 bp, Mus musculus
aagaaagaaagaaagaaagaaagaaagaaagaaagaaagaaagatagatctaggctcggggaggctgcaattggtattacccaattggcacagatcagtttcagaaaaaaatgcttccaagaacttagactaaggaatgaaccaagcccacagtttatttttatactttcagtcaagttggaactctgtcgaacctcacaaataagttatactttccgttcagtttgtgtttgttccatatgcggagtgtggcactctggctagctgagttcagttcccacggggactcctgtttcttaggaagcatgccaaatgccagcttattccagttcttttgcttttgattttttttcctctactctttcttttctttccctttcttccctgtttatcaagtttgctttccagtgtttacaagttgacagactacgtttgactttggttgtgtttaatgtccctgtataaaatagctcccccccccccccgccccctgttttttctttaagcaacaggtaccccgtagaggcaggtagaatcctcacaggttgcttttagcatgggtgaaggttacaaaagatgattgtttacagtggctctatccccctaaccatcccctgccctacccctgaggattctgattcattacagtttttacctgtgtcaaactggggcgagagcccctccttctgaaatgattttgccttttttttttttttgttaattctgtttcttagggggagatgggggatgttagaccacttttggattagctgccacctgcctgtgtctgtgacactggacctactgcccaggtgtctgcgcacccttcctctgaaggactcctttggctttgttgaatgaagcagagaagattgtatagttggggctggggctggtcttggtgaacacacttttctttttttttcttttttcttttttttttcctttttttttttttttttttttaccccagacacctcctttttgtagaaagccaaataaaatatatacataccacttcctttagagcccagaatctagatttgaacggaagagcgcgtgtgcttcagggaagtagtgtctccttttggaaatctatggaagtaaagtgacatcggccttctgttcagttaggcaacatttgtaaaaaaaaaacaaatatcgtctggagttataatacaactctcctggatcggaaaccaagtggggggaaaatacagaaactttcaggggatgggaggggggagaagggaaaagccagccctttgtatagaaattttgcttttgttttttcattctgctttagaacgcaagcttgtgcactgtggatgcgtgaatattttagtgtgaaacgt

SEQ ID NO: 34828 - DNA, 1800 bp, Mus musculus
ttggcttccagcaggggtagacatctttcagagtcatggtgactgctaaatggttagtggtctagaaaaatagcccctgggacttccctgtaggatgctaagtgtatgcagatgttgaagtttgaatttgaaatttgatgagatttttaaaaacaaatttggctattgcagtgcactgctgtgattcaggataaagtggagcacagcattgaaactaagaaatttgttcactcctgaagagaggtccatcttcaggagtggtcaacaaaacccaaaaaagggaggagggataagagaagttagcgcaagtaaaatttatagaataagagagtgaagctttttaagggcagctcccacctccctcccctggtcattagtaaggatttaagtgacttgggcctgatttcagatgctttaaataaactaatagtatcgctcttgttagtggatcgtacatagaacagctgatgaagtcaggtgtttccccattccactctctatccatctgctcctacccaaaatcgcctgggatgcttttaacaagtaccggaaactctgcccatcagccagacgctatttactatgttccatcatgaaacactgaatgaagagaagagaggttaaggcagggactgaatcccatcccccatcatcaaatagctgtggtggagaagacacttaagtccctaccacagggcagcagggagtgaatttgtttgggtgagctgaactctgcattatgcaaactaagattcccctactgccccaccctcaccccttcccatatatccgaacctttagcttgaggtgcctctgcagagaagtagctttataggcattgtccaaggactatgtaaatgggacttccggtttcccaccatcagcatgagtgtgacaagcccgctcccctgtcactgtgttgcatgtctgagcatggctcccttcacaccctttcataatgatctttttttttttttttttcttctttagctactgaccctgacttgtgttaggcaatgctggttctgacgaactaaattctttaacacccactcttccttcttagattgaaaacatcactaaccgccccttccacgccctcctttatttttatttttttacagctgtgtgtttggagcctcggcctctgacaggtcgacacagactttctattctaattgcctttgttccgaaggatctcgcaccctggcggctcccagggtagagaggtagctgtagccaaggtcctcagagaggggcagtggagtattatcagcctgaagccttcgagtagggaccggatctccaaaggttaccagtgtgagggcaggaacatcccagtagcccacttaatacccacaccaatgttcatgaactagtgaagtgtggcgcctccttgtggctcagaaggagtagcagcgttcactcggtcatagttatttctgtcctaaattcttcagcctggatcagccccacaaccacaagcgaaaccttcatggtcagttttttttttttttaagggcaataaaacaaatataattggtcaattaatccgttggtgctttcatgccacccacaagaatggaatcggtgtttttgtggctcagtctgtcagagttcatttgttgctgtctaatttgcattttgtcatccaaatccctccctcctgctcccaacacacattcataattcctaagagaactgggcaggaatggactccgcaccaggtgcctcagtgagctcgggtccccccgaagttcaaggtcaaccttgggtctctgctaagacctaaggaactga

SEQ ID NO: 34829 - DNA, 1184 bp, Mus musculus
ttttatctcaagatgtccatcacacgtagctgaagacagcaggttcttctcttgatggatgcaaagattattaaacacatccagaaggtataaagatggacagagtgtgtattgcttacagcaagtatggagagcagtcaaactatttacagagatgcaaagaaacccagatgtttttggagaatctgtgcacactagagtcagagcatgtgggataggcacactacaaggtgtgcatgtgtgaacctacttacttgatggccataaatctcatgttttagaaatgtagaaaacaggcaccaacatttgtatgtggagaacttagaagtcacttcctgaacgagtgagtcacttcagcttagtgactttggctgtttccttgtaagtttctctaaaatgtcttaagtgaagcataaaatataaaggctggaaagatggttcatttggtagagttcttggctagcattctcaaagcagtgggtcccaacttcagccttggagaaaccgggcatggggtgagaagcctctaaagaacattcttgggtccacagagagttcaacccaatctagactatgtgaggatatctaaaaaaaaaaataataataactctgaatgtacatgaatagtcttttaaagtatcagcacttgtttacttctaagtttaagagtttgctatccccaaaacagttgtctggcttagtaagtaacacaaacaacactcagttctcttcagaccattgagacaagtcttggtgaagggagcaaggccaggtttaaaatcctagagatagtctttgttccagtctactttctttgcctgtctcttgtccactagacagcattcagtatgcttaccacatagatttcttctagccttgaactaaggccgagttgtgcttttcactgtttgtgagaacagcactgtattctcttgagtcctcttctgtttgaattgattccaaagatcgactccaccatgcatactgttggtgcctgttagataaatgatttgggattcttacccagaatctccagaggtggcctttaagaattattgtggaaaacaaacaaacaaacaaacaaacctctacgggtacttctattcacatttttcctccagataaaaaaatgaagtttattaggagcagtgtaataaatggagatcagcaaagctatagcaaga

SEQ ID NO: 34830 - DNA, 1113 bp, Mus musculus
catataaacactctaacacattcatacacaaacacactcacacattcactcacagtcacacagacgtatacacacagttacacagtcacacacagagatgcacactcattcatacacaattacacacatactcagacatacagtcacacatacagactcacacccacagtcacacatacagactcacacacacggtcatacctacagatttatacacactcactcacattctctctctctctctctttctctctctctctctctctctctctctctctctctctctctctctcacacacacacacacacacacacacacacaaacaggtcaaattttgaactaaacagctcctgcttttaatgtgctttttaaatgtctaaatgctttgttgaaatgaagatgcaagtttggtttggccatgaccattatcctaggacaaggaggaaagcatgttttacctggccaggaagaaccccagccttgggcagcctccctctgactccacatcttcctgggctgtgggaaaatatggctgccttccagcacctccctggagagacagagagaaatcctcaaaggtgtggcaggggctcaggagcagctgtcagcagttgggaaggtgaggcacctgctgggaaaatgatagtagtgcaagaaggtagcacacaaaggcctgaggcccaggagaggccttcaaagctatccttcctgaagcagcctcatgggagccatcttggagtacctgcagaggaaccctgtggactgagactacaggatgcaagacaggagagcacgctggagccagatccgaggctcagagacaccagcatgcattatttatacctcctgacaatacataccacagacaaatttaacggatagataatattattctttcttttgttcacttttgattggttccagctagaaaaaagaaattcctttattttatttcaacctgtctgctaaactaggccagtgtgtcatagaaacagacttttttctttgagatgagtgaagtgtccaactcgaagaaatttttctttgaatcagtggattatttctttttaattggctttttaactgtgtttcattctttgaggatcagtcct

SEQ ID NO: 34831 - DNA, 1166 bp, Mus musculus
cctttgtataatggttagagtatcgggacatacaggagaaccagtggttttcataatttgaatatttgtagtatatgtactcaggcctcactcatgctgtgcaagcaagttgcctctctgcctcatccccatgcctctctcaccttttattttgagacccaagctaaccttgactcactctgaagttcaagcaagccttgaacttgcaatctccctccttcagcctcctgagtagctgggatggcaggcttggcccacgaggctgatcctcagtatctctgaaggtgctttggtagaggcttccttagtctccagcttggctgtgctgggaagtggtgggaagttcaagaggcagggcgtcctgggaggccataggcaggcccttccaggatgctggaactctgcttccttgctctgtgtctgagttcttcaccaggaggtgcatggtttcattctgttgcttgcctctggcatggcgtgttttccttttggaagtctaaagccagtgcatatgcctgattgtagactgtgttctccaaatctgtgtccacatacccctttttttcctcatgaattgtttctgaggtgtttgtcatgctggaaagttcactgatataccttgctcacacaagctaatggcttcatggtagagctgtgtcatgggcattggttattgatatcatcacctcatctctgctacttccatactttaaagtttgatacccattctttctacaaggaaggatggaggaatacatctcccaggatttgacaagaggaacctgttcatttgtttttactctcattcatcctaactgtgaacacggtacatgcagttacattttataggaaggttaagatagactaaggatgtttttcttggtatgtaaaacaagttaaatgatatgaataaaatattaattagctgatactagagtggtgactatgaaaatgttaagcacattgtgggtgcaatcattgggtttgacaaacccttggattgctcttcaggtgaagctgttgtttctctctaataggaagaacatgtccttcaaggccatgagctaactaagcacactctaggtagatcattctcagattttcttctgccagaaagctttctaaaaccggtttatcttgctgttgtcactctcagaattctctga

SEQ ID NO: 34832 - DNA, 1138 bp, Mus musculus
ctccaaacagaggcttgataaattgtttccttgatttttgtttctcccccagtacaaccctcagcctcaacccctattcctgagagttctgagaccagccagaccataaacacgactccaactgtgaacacagccaagactacagccaaggacacagccaacaccacagccgtgaccacagccaataccacagccaataccacagccgtgaccacagccaagaccacagccaaaagcctggccatccgcactctcggcagccccctggcaggtgccctccatatcctgcttgtttttctcattagtaaactcctcttctaaagaaaactggggaagcagatctccaacctccaggtcatcctcccgagctcatttcaggccagtgcttaaacatacccgaatgaaggttttatgtcctcagtccgcagctccaccaccttggaccacagacctgcaacactagtgcacttgagggatacaaatgcttgcctggatctttcagggcacaaattccgcttcttgtaaatacttagtccatccatcctgcgtgtaacctgaagttctgactctcagtttaacctgttgacagccaatctgaacttgtgtttcttgccaaaggtattcccatgagcctcctgggtgtgggggtggggagggaatgatccttctttactttcaaactgatttcagatttctggccaaacctactcaggttgcaaaggacttatgtgacttatgtgactgtaggaaaaagagaaatgagtgatcatcctgtggctactagcagatttccactgtgcccagaccagtcggtaggttttgaaggaagtatatgaaaactgtgcctcagaagccaatgacaggacacatgactttttttttctaagtcaaataaacaatatattgaacaagaataccgaaatgtgctaaattgaaagataacccttaatgagtgataaaatacaaagtgttacctaactttgtttttagaactaggaataaaagtgtgtgtgtgtgtgtgtgtgtgtgtgtgtgtgtgtgtgtgtgtgtgttttcaaggacagatgcaaggttaatttatctcagttttgttttgtccagtcaaagctggtcatttcttccttgatgataatttata

SEQ ID NO: 34833 - DNA, 1365 bp, Mus musculus
ggattaaaggcttgaactaccactgctgggctattagcaactctattgcattttggtttccattttttaactgtgagttgcttgggctgttatgtcaaagcatagaaataattccacctgtggagtggctgtacaagatccctgtgagagcaaacagttgttggagtattcataggtagagactttgtattttggggtgttttgtattcttttgggtgagtggggtacttaacttgtctgcatggcctctaactgcccttgtgtttgacttttcattaggggccttggacaagtggttaccgactacgttcatggggacaccctgccgaaggctgccagggcaggcctcttggcactctcagctttgacctttgctgggctttgctacttcaattaccacgatgtcggcatctgcagagcggttgccatgctgtggaagctctgacctgggtgcagcactttgattgtgtgcctccttgcctctgctttaccaatgccgttcacctcgcagtgaggggggatgaaggataagcccattggtgggcagaatgtcttctaattacatggttattttcagaatttatttgttgaggaagaggtttgaggagttaggttcgaccattcgtgagtctgtgttccatactccactgagtgtgggcactagctcacagcctcgcggtgagactgaacatttcatgagctcatgttgcctttgaccaccatttcttaaggagagccagctgattgctgtcaggataagagcatctcttcagccaggagggaggcctgttccctcctgagttagactttgcatgaagctcgaaagtattccctttggaacctcccattcttgttcaggtgacaccagctctgttgatggctctgcttctagggaacatttaatcaggagatgctctcaatgactaatttgtctaagtcttaggaaggaggttgaggaaagctggatttagacaagttcaatttagggagttctccttgtttgtggattaaaatatgacagattgcaaacagactactcttcaaatgtatctcaattgtgcagaagtgagctgtccaaaagtataagactaagtgataaactgtcttcccaccgtgggagttgttaatgagaaagaaagtgtactctgaaaaaacaaaatttttaaataaaatattatataatgaaaatacattgtactttttttttatgtgctagtattctctaatatttgggttttggttggtgcttacatgtttgaaatagactcttacaagctcatactgatctgaaattctctgtaggtagaccaggatggcctcaaactttgcaatctttctgtttctgcccctcaagtgctggagtta

SEQ ID NO: 34834 - DNA, 2368 bp, Mus musculus
gttgtgtaccaccatacccaactcaaagtctgacttacagttcagatgttaataatttacccagagtgcagaatatgaaatagaaatgtactttttctttcctccgtaaaagttttgccttttctttttattagtagtgatcagcaagacattaccaatggaaaaaaaccatctccccaggtaaaatcatctgcccgtgaatctcgaaaacataagaagtcaaagaaatcccataagaagaagcagaaaaaacggtcacacaaaaaacagaagaaaaacaaaaaggaagttacggacataacagcagattcctcaagtgagttctcagaggaaactcgagcttctagtactaggaaaaggaagcaaccacacaagagcaagaaaaagtccaggaaaaagtctcctaaaatcactttccctttagggggagaaagtggtacttctcagtcagaggattctgcatctagcagttctgaggacatcgaggaaagagatactaagaaaaccaaacggaaaaagaaagagaagagtgtccatgtccccatgcctgaccctgaggtacaggagaggacaagcaagcgcaggaactggaaggtggctaccgacgccaggtctgctgagagctcggaggatgactaagtgggagagcagcagtcctgcttcccactgactcgttaggggggttgccagtgactcctgcagcacaggcaggcgtctgaggtcagagttgtcctgccccagataccttttttcctattttggcttgttaatctccatcctcttttgttaatagggaatctggtattttattaaggtttcttgaaaaaattatttttttcaattaatcacttagggtagaatacctatacagcaaattaaagaacccagaaagctgaactcagtaatgacctgggcacaccaattgcaatgttggatttgatggaatcaagagtccaggatggaggaggaagactgaagtagtgctaaatagaatggtttgacaaggagaccgtgctattcatacaggaggcatgctgccttcagctttggtgctttggttcttctgcagttgggccctataggcatccagtttactgagcgaggaaatagttaaaagaacaaaccttttcccttcatggtaatctctacagatgactgctaaggaacctagggttttcagcctaatctccctgctggccagggtctacagctacatttagcataacccaaacataacagtaactggatagtaaatgtttttctagttccattgctgtatactgcctaaatgggcttgtatttgaaattgtttggttgtcctatctatcaaatggaaagaattaggaagtagttatgttgccatgatgctttcaaagagattcagggcatcagccatctaaatgtctgttttttaaaaaaattttattattattattattattattattatttttgctgagttggggattgaaccgaaggccttgcatatactaggcaagtgctctaccattgagccatacccccagtcctgttgttttccttgttcatttctaattctattaatggattttagattttccctgaaaccagttgaatcaattccaaaatgaaacacacttctcagggacatacccacttcccagtctgactttgtgttttgattatcaagaacatattatttccccctgctatatactgtgatcctgatattaaaagaaaccaaaataccactggaaagtggctggtagaacagttggcttttcattaagaggaaagataaagtgacatttatcagggtttttgtttttgaggttgtcactttggtactgagcgaatgcatgaaaactcaagactgtgggccatggttctgccactaattgattgagttctagagcaggttaacctccctggccttactctttgcatgtgtaatacaaagatacttcatggttagcatgacatacaccagcaatagaatatgataatgctgacatcccatgaagtggcattttatagtaataactaaatttgtgctctttatggaacatatttctaataaaatgcttgttcttaaaatatatggttggccagatgtgccctatcccttgattatgagcaggtgccgccttttggggtactgaaacactaatgattttagtactcaaatgccaatattccatgagccttttggggtactgaaacactaatgattttagtactcaaatgccaatattccatgatatattcttttccttgggtctagtggagggagagtctagttactacctcataaccttctagaagcaagtgatatctttgttggaagtagttttgggcatgcattcttaatgcagttttgtgctacaaa

SEQ ID NO: 34835 - DNA, 1231 bp, Mus musculus
agggctagaaaagtagatatttctatattaataaagattggtttttattttgatagacaggcttagtcccttagctgacctctggcttttcacccttgctgttactgcaaggtgtccttaggctgtggaaaaaacagggatgaggaggaacgacttccagctcctattttagccacaaatcgtggtgttactaatgacataattcttgcctaggtcttgctaaatctgaggttgataattctcctttaggagctgcacagcactcagaactgtgcatactggtttgtgattgtacaaattcagtatgggcatcgcttggtgcagaggcactgcagggaaaggtccagcttgaccatttctgagtttcctgtgagataaacccggtttgaaagaggttggtatcatattttggctaaaaataaaaaatatttttcggctctgcctcacctccccaaaagatacccagagccacaggtgtgggtcttaacaatacccacgggaggaatcgggtccatgtccacccaagccaaggttaaaagcccactcatctacggatgagaaaattatttgatcacctcagttaagcgttgccttatttaacttaattaatgggggggagagagattggagacgtactattgaaagggcaagcccttcactgcctcccacccaaataaaaaagccaattggccttgtactacaagagccggtcgaactccttctccctgtttcccacctatcatccaaaaatgcggaggaatatcaacttagtgttattcttattatagtgtatttcacatttgttcagtcaaacttagccagagttccaacgccctacttaaaattcaactagaaagttacctaccaagtactaattagcattataaagtcagagcctacagctccaggcttttcagttagttgtttactaagataagaaaggacagtcttaagccagatacagtttaccataaaaaaggttaaggaatcccacgaaagcaagtatttttctttagccctagattccagacagaactattgagcatagataatttttccccctcaggccagctttttcttttttttaaattttgttaataaaagggaggagatgtagtctcccctcccccagcctgaaacctgcttgctcaggggtggagcttcctgctcattcattctgccacgcccactgctggaacctgcggagccacacacgtgcacctttctactg

SEQ ID NO: 34836 - DNA, 1103 bp, Mus musculus
atttaaaaattagttttttgttgtttgtttgttagtatagcatataagtgaccttaattctgtcatctgaatgataaaagggaaataatctacctgggtaggagtcagctcgtgggtggctgttgccttgggctcattggtttccttcagaatacccactgatgtttttctttctagctttgatgtggctagtgtgatgtccgttacactcagctgtgatcatcgagttgtggatggagcagttggagcccagtggcttgctgaattcaaaaagtaccttgaaaagcctataactatgttgttataatttacccaagaacttctactctttctctgctgacattatatttatatgttattaaagaggtggttcttttaaagtttcactagttaattttattattcagtccagataatttatttgtaatagacataaagaatcttttgtaaatgccagttacacccaaatattgtaccctttaataattaaacatcagtttaaagctggacactcctagtgcaggggacatgtggcctaactctggtgagaaggccttcctaggggcataggatgggcaggctcataaaagtaacctggatgagaccttggagtttagaatttaattgattcaacttatttaagtgtgaggagtttgaacaaaagtttttctttggaatctaaccctagttaaagtctcctgttacatgatctaagtttatcactcaaggaaaataagtgaaactttaagagtcatcattttcttagacctcttcaaccaactgttatttttatatgaatctctaaataaaatagcttcccctcaagataaagatataagcccgcttcttggtataagtgaagatttatgtatttatttataaacaatttcaatgtataacttgagaattctgcagtttcctccgaataaaagaacatgcatattgaagtgaacacgttgtagaagtggagctttgcttctgagatgagccggatggtgactgtacatggacccgagtgtcacgttattactgttaagagaactcggtgggatgactatgaaatgtatatgggagaagtgtacatatgtaatatatggttttat

SEQ ID NO: 34837 - DNA, 1190 bp, Mus musculus
aagtattggtggtaacctagatcagtggttctcagtctgtgggtcaagtgaccctttcatataggtcacatcagatagctgcataccagaaacttacactagattcataacagtaacaaaattacacttatgaagtagcaaccgatctattgttatgcctgggggtaacaataacatgagaaactgtattaaagggtagcagcattagaaaaattaagaaccactgacctggttgaaaagatactttgtgtgtctgtgcagagaggcgggtgggagagaggtttgttttgaccatctggaagaaatctttccatcttcctgttgcttttcactttggaggatgggttagggtgtctaatcactcttgttttaaaggttgatttaactgggaaagcaattagtacagacctttgtgatgggtgacaaggtctcactgtatagttggtaagcatgcgcttacctgaatgcttttatgcgtcctggttaagcagtgatgtgtggcatttgtctccacagattgttcttcctgccctctccccaaccatgaccatgggcacggtccagaggtgggaaaagaaagtgggcgagaagctgagtgaaggagacttgctggcagagatagagaccgacaaggccaccataggtgaggaggatggccatcagtacatttttttgtactgagtgagtggtaatgtgacatttacagtcctgagatttgctgcctgggtcatattttataaaaaggtcatcacagccacacgtgtcagttctgagctgtactcatcaatggaggatatgtcagggtctattctaaggcctgggttcactctcttggctttatttttatggtactcagaagttgtaccagcactgccattgtctaaacatgggaaaagaaggagggaggaggaagatagtcatgccctctagggcaggagaataccaaagcctttcaggtgcctctgagggaaaacagtacccagggtgtagattagtctcataatctgaaagtgccatggatgtcagtctttttctcatttccatgtgcccctttattgacttattcaccatgcagtcatgtactgtgcttgtgtctattgataatcccaggtgttctgaacctgtttccactcttccgtggtttccaggagcagaaggcccatccacgccatagtggcagagcaggacat

SEQ ID NO: 34838 - DNA, 1230 bp, Mus musculus
aagaagtctgggtaagaggagtgatgttgctgagtgagcagtcctcacctgtgaagataggctttttgtttttattttttgtttttaacataaagattttttgtatcagtcgttaaggattaaggtgaaacttctctgttaaatgttgaccttgcctttgccttttgcatctgagatagtttcatagctgaaggccttttgaggattatctagatgaagacagtctcctagtgttttcctggtggatgtcccgttactgttttctgtgcacctgagtggggagttagtggcattctcaccctctttgttcagggccatctgcttgcaagtttccaagctgagacttgagtaaagggattgagagacctttagttataaatttcttgcttcagactgacttgtgacctctgctcctgcccccaactgaagttctagcagaaatcatgttttcttcaagtgtaatgtttttctggtgatctggggtgaagggttgtctgttaagcaacaggtccgccatgtgttcttttcattcttctcgcttgtgtctctgacagttggcagcttcagttcattccatcagagttcagaggtcagctaccaaagcctttcgcagagggaccactggccaccaggactgttcccactcacatgaacgaccagaaccgagaggagccttccagatacgtaagggctgccaatcttctcttgctgctgcctagagagacagtcaccccagatcactaggcattgttccgttggagcattaaccaaacgagtgtctcagaaagctatttctcagagagacagagagagagagagagagacagagacacagagagagagaaagaacgatgcatgcgtggagggagtggcagcatcccctcttcccaatttactctcttaaatgtctgtggaaagcacacagttgagttaactgagaaggctgagaggggctggggtcttctcatgagagtcttgagcagtctttctgagtacattgaaacccacagcattccttgttctgttgaaacgcctgctggtacagttctaagtgagcggttctaagtgagcgggttaccttggacctcccttccgcgcccttttgttgtacttatatagcacaggaacacccagaaaggctgtccccatagtgaggccatggagcaggctctcctcagtgccacgaccttctgcctacttgccgtcacacactctggagtcctgtgaatt

SEQ ID NO: 34839 - DNA, 1543 bp, Mus musculus
aaaatgcggacccatagctcttgctagtctgttcagacttattaaggagacagattttttgttgttgtttgtttatttgttttttgttttggcttgagtaacaaggtatatggtctattattatgatctggtacctaaatagtagacttttctgtattcatatgttttctgtataaaacattatccttgatgtagtgcttggtttcttttaattattttcagagcattcagtaaaatgatgaaattcctccccaccccctttcttttctcttgcaggtcttccaagttgcttcgggcattctatgttcccttcctgtcagatcagtacacggtgtatgtgaactacaccatcctgaagcctcggaaagcaaagccgagcaggaagaaaagtggaggttagcaccccggtgactccagaggacagcctgtgctaactagggcttccacggagccgacttcctccaaggcatcctgttagagctgtaataaaggtcgtccaccaagagtgccagaagctggtgctctgagctcgtcatggtctatgtcaaagtctaatcaaagtcacacacttcctgctcctgggtctgttctgcatgtgagctctctgcagataggcacagtcctaactcctggggaagtccagtgctccactccaccttgttctccatgtaggtactcactggagggagaagagtagaacgtgcttgcagaaactgcgagaggacctaactcggtgtgggctagccttctccactctctggccagcatctgagaactaccaagcctcccttagactacaaggtttctctctcagagctgtttggcaacttctagcaggccttcttcaaatcctactgctgaaaagcagctcagcctagttgccaaccagatatggccttttcccggcagcaagacgtggcttctaaagtgttcccaggactgacactgtcctgaagctcaggaaaaaggcgaccactgaagaactgtgacctaatcatattatttaatgatgcctttaactttccttttattttctttaaaactggtcttaattatatggctttttgggaagtgttttaagatttttttaatgtttcagtctgctttattgaattctagactctgtatatatagggcgtctttggagaaaaaggtgtatcaatagatttgggtgacaacacattttaaagtagtctgaggccattttggggaaattaagaattccttttcgtaaaatgatagtcccagtgaaatgaaaatgactgatttcagttctcctgcaaggtatcctctagataggcattggcaaggagtcccccatcaggtccgcctgcctgtgacttcaccttctcttacaatatggcacagcctgtaagccattttctcagtgtctcatgtgatcctcacaactactgtgaggaggaccagcttcccagacaggagacaaatgaagacggagggctagagccttatggttgggcagaaggtgacatctctgctggctgacttctcatgcttgtgtgagtgtccgcgcctctccgct

SEQ ID NO: 34840 - DNA, 1172 bp, Mus musculus
ttctgtgcctgaaaaatgtaaagatccctgaaacagtgcctgactgcaggcacctgaccaagcctctacatacacacacatgcatgcacacatacatgcacaatatgcaaacataggtcctctgagtaagagctcaaacataatgtaacacaaaaatgctagatggatgcagagatttcttggaaatgtcagttcctatccctttgaaaacctctctttggttttctccattctgtcttctggtaagagcatgcgtggtacatctcagacatgatgccaagtgcctcttagcagcctacagaattagctttcttgggaaaaagaaaggtctctgatgcacagcccccgtctcctgcaaagactgttgacagataccactacttcggtacctagactaagcattaattggtagattgttgctctagctgtagctgtatctatagatctgcatgtgattcagaaaggcctttgatggcaggacaagggagaggacataactgtgtacttggcaaatctagacttctctgatctctgaccctaaattagcctgttttggaccttaaacccgtgactctgagtacgtgtgctgacccaatctaggtggtaggaatcacctagattcaagctctgactcttaaacaacttcattatgtgatttaaaaagaagaagaaaagacaggttagtctaatctctggggagaattgcagagaattgcagcctgtactccttattactgaattcaggtttagcagcgggcacgcttttaaatcagggtggtggttggtcacaatctttaggtcattttcctagtctggcattctgggaaagacatttgaactcctcctgtaagttactaggaagccgctccaccagagggaaccttcttacgtgttgtgcctcccagggtcgggtggatgagactcactgaggttccataacaacctgcctaataccagtctgctaggctcctcaggcaactgaggaagctggagtgggcgtgtgctcagctttaatggtccgtgacaggaagatcaaggcttctgtaaggcgatgactgggtttcctggcttcgctggcgtgtctgtaaatctttaattatcccagcctctgagagcaggtaattcctaatggaaatgacatcaggaatcagcagtgtgctgcccgacaccag

SEQ ID NO: 34841 - DNA, 1896 bp, Mus musculus
gttacatgctaaatggtgaagcgatcactcatgaaccttctgtaccactaatgtgattttgtttggaattttccagttcttgccttggcataaagatgaacaggagggaaaagcctttactaaattcttatcacagatctctagtcaatgtgttcttgccctgggtggagaaaaatggaaaccttcaagatctcatccaagcaaatggcaacaacatagaagaaatcagatttcagtgacttgattctctctacacatgacctcagactgacttgacttctctctgttgggataactgtacgctcttcttctgcccagttgctgatgctcctcatacagtcatctcttgagtgtctcccagggtttctctccagcaccattgaggctcctgcctcctcccttttgaatcaggccccagccacttacgattccagacagaccctggatggatttggaccccgacacggagtggagtgaatcccttattgtttacacatctctgtgtggcgctccatctttccaatgttaagagtaaatggtttagaataacttatttatatctgcttggagctaatattgagatttgactgtagcgaaagccacatgctcctggtttcgatggtccgcatcagcatctcacatgaaggagatgtggaaggctaacgaatggctggtctggttttcatttgctcagtttgactgtaatcatgtcatgcaggagctggaagtgggtgtatcttgctgctaatgtgtgatgttgaaagaaaacaatttcaacggctcagcactgtgactgccttcaaaaactcagaagaaactttagtgcctcctactaagttgtggttctactgtttcattgtgaagtgttgtgtttcaagtaagtgtaggaaccagtggccccaggctctgctcccagcactgttagtgagcattgtgctgttgcgataccgtgcagtaccaaactgaagcttccttgctcagtgttttcttgtggtgtgggtgatgctagaacttttttctacttttgcagtaaaatttcattaatatgtccagaaatttaaggtgacaggtcaagctgaagggtttgctgaagcaaattaattgtgtctatggaaggctgctggacactaattttaggaagtacccccttctcagtgggtgtgcctgtgaccagtgtccctgctctgtcataacccagcccttccaggagcagcgcacacatcacacttttcctgaatatccctgtgggtaatttaaatattttcatctgactccttgtctcgggtggactcaagttaatgaggctttactgcggcctgttttactcaatgcatcataccatgtagtttgatgtttccattttggtttctgaattgttgattttacttacaaatccttttagatataacaagccctgttctgttttgtgaaggcccaaagatacctacaaatctttgtacattaaacatgttacataaaaccaaattgtgtaaatgcttttaagtttatcataccttagaaaaacagaacagaccgtttctatcagagaccatgtgcctgcattttaaactgctggttacttcttagtaagttttcatttttgtgttctagggccaaagtttgactattttcctaagcattttagtgccttaaattagtctgctgtaaacattttaatttcacagtttctttttcgtcacctgcaggctgtattcctctttaatgattagttttatatttgagagagataattgtcttgattgtggaaatgtgcattgggacagctgcttcacctttggttggaaatgccacatggtacactcactcgggaataaacctctaaagtgtctctgctcccctaccccccagccttgtgcatttagctttctgccagca

SEQ ID NO: 34842 - DNA, 2529 bp, Mus musculus
ctcagccaatacccagagatgcagttgcagccactgccctctactcccggcccccaggctccacctcccttaccctcacaattgcagcaacatcagcagccaccacccccaccaccaccccctccaccacagcagccaggagctgctccaacctccttacagttctcctatcagacttgtgagctgccaagcaccacttcttctgtaccaaactatcctgcttcctgtcactatcctgtggatggagcccagcagagcaacctcacaggggcggactgtcccaggagctcaggacttcaggacaccgcatctagctatgacccactggccctctctgagctccctggactctttgattgtgaaatggtagaagctgtggatccacaacacaatgggtatgtcctggtgaattaatctcaatcaggaagtgaggtggctctagtgaaggcagactgtggatttgtatttttattccatccatttaaatttaaagcttacttttccccttttccctaatggggaaaaatcgggtttcccaactggaatcagggtttgactagggtagatgttcctcctggctctgtcctaccacagaattttctgtgccaagggctagaatgtagttggaagcgggagtgtatgccctaaggtaacatggagcaagctctcaaaggaggaaccaacaaatgtttgtataaagtgacagcatagacctaggttttacaccaaagattcatttaccttggtgaaagcaaggcaaattgtgtgttgtatatatcacatagtgggagggaaaggggatacatttccctaaagccaggctaggcaacagcaaagtacttcaaggcatatcaagatgttgatgcagggtgtcctcaagaccatcacaaagcagcagagcctaagttgtgtttccaggacacttgagtagcagctggtactgatcccagaaccctgtctgggagcacgcaataacaccttctcaacagtgcccctggatggccgagtgttaggatgcgcagggttccagagccctcacctgtaacaacaggagcctcatcccagtggaggctgaggcagaaaccagggagcctcaggaacttgggccctgtgctgggaagccaggctcttcctgcacagcctccaggaagcccctggagtgtgctgtgctggagtgattcctttggtgactcctgctccccaccgtgctgtcctgagcttatggagctttgcacgttgggcaggcagtttcatacagggcttagacattttaaagacgcacaacaaaggaactttcacatgccctgtgtagtgtgtgccttccccagctcatcacactcctttctctaggaaccaagctttccagttatgtcctgctaaacccaaaggttcttgaatctgtttccaccatgtgggatctgaattctccattccttaaacttttgatttgtatgaaatgttcatgtattatagcaatatcaaagaatctcagatgtgttagccatttatgagaaaagcttaaccctttaattgaaaaatagatgctgtacctagtcaacagatatctaaaagtaactagtaatctgttgtttgcacagtgacatccaggtgttacaggctcagtattgtttataaaattataatttctattctttagagtggcttgtccaatcagcagatgaatgcactaagcacaaagcgtcttccttaaagcacaagaagagagctactccacagatgctgcctctagaaacacctataagttgcctttcctctctgtagtaagtgtccaggcaggcaagggaagactaggcatgggaagtctccggagagccatcctggcccgcagcccagcccagctcagcccctgccagtgttggtgactcaagcagtccttgaggctggccagagactgtagttgttgggctccccactggtgccaggctgctttggaaatgcgctctgcttggaattgggctgtgggttacagcaggagtagatagcaggagggactgtcattttgtgatttaataactaaaaatccagtaaggataatttgtgtttcttttattcattctattcctcctcgtacttaagattgataatttcattggagagatcatttcattaagatctctgatatgtttaaagctttgcaaaataagccaagttataaagtggggcttgatttctttagactgaaggagaatgttgtcccagcatttactgcacaagtgctgtaatattgacaaaatgaaaatgccttccagattgaaaatgggggctgctcatttcaggactgcaggatcagaccacagcagattggcataaacccctgtcccccaacagggttgtgagctgcttagcccgggagacctagcagctatggcaggacagttaggcaacagatgaggggctgcggagaggctgtcagaagtttaaaggctgcagagagaagctgggaacgctcatcagcggccaagcctgttaggcactgacacagagaggaggtgaggacagtcgccttgt

SEQ ID NO: 34843 - DNA, 1183 bp, Mus musculus
agatgcttttcttatggacatgggccaaagtttggaatcacagatatggttggatgtctagcactgggactatgaggcttgtgattttacattgggtatttctgtacttaagtttcttcatcataggtatttgtggcttttacttttagaaaaaaaaataagttgtcatttggagaaagtgagacagctctatagttgagtttaaagattcttctttagacagtagaatttttttttaaatggtccagacagactgtagcaactgtatcttattgctgaaatatatgtctgttttccaattatggcctcccagtcagtgtgttttgaattgttaacaaaaatgaatactcttttactctttgctaaattgtcaggctccacatattttataattgatacgttatgtagcttatcatccccactgttgtagcgcctattatatttcaggctggttaggggagtgtcacatagtttcattctttttctgcgcatttgtctctccatctgtgagtgcagcgttttgttgatccttgcacatattccgtgtatctgtctatactctgactttgaatctgttaatcaaacactgcactggttggtaaccattgtgctctaaaatgatgcattgctattgcaagcacgtggtgattattttccctagcgtaggtaacatcttgtctacaagtgaacataaccaagtacaaggatttgaatatgagatatttatagtgctattgtggcagagttactcaataagatactgaacgatcattgtaattatctcagttcacttacgtgcttatgtacttgggattaataatactcatgctatgataatgcaacagagagtgagcatttatttatccacagggattatgcaagataatgtaagtcagagcatttttaaaattttacaaatggtggaacatggtacagttgtaggtctgtcctgttactgtgctcttttggaaaccagatggtagtggcaatgtcatgctggtggtgggagtagaaaaggaagagctcactggttccttttccaacttctttatcaaggctaacactaccattttccacagaagtgcttccacaagattttaagttatcctcacagcactcataaacatgtttgaacatctacctaaatctaagagaggaagaaagtatgcatgaaagtatactg

SEQ ID NO: 34844 - DNA, 1206 bp, Mus musculus
gtggatccttgggagatgcagctgccttggttgcagttgctcaaacgcagtcgtctacttgcccacttctctgccttagtcccagggtgtcgggaggcactggagtccagccatgcagccgggagcagcgctgcaggctatgttgctggcggtgctgctggccaaaccgagggattcgaagggtcgcctgctgagcggtgagtgtgtgtcctgggggagagggctggtgccagagcacctggggttgatgcacccagtaaacctcagcagttgaggactgtcttcagggtcactgcaccctggcccctttatgtagtggggcaatccccagatccaaccccggacccaatcagccttcttgaattctctgcttccagggagcaaaaatgcaaccagctccagttcctggggccaccctaggtatccgcaacgctggaagtcagttctctccccggggttactaaggggtgaggaggatgtagcttgggtggggcagttggcaaacttcttccagtgagtgccccttgagcgccatgctgcctggacccttctagtggaggcagccgatcctggatccgcagggctatgggaactgtacctgttactctcctctgaggggagggtggctggcctggaaatgcttggagattgggaaagcgcctagttagccaggaaccagccctgccaggctccaagagtgactctctgcttccttccctgtgtgtgtgtcactgcagcctcggacttggaccccagaggaggtacagtggtccgacttctttcttgttccactaggtctgcatggggcgcgggggtgggggggggggttggggggtgggtgggaggagcgtgggcggggagcgatcggtatctttttatcaggttccctttggccaagagggatggagtagaattggaatctccactgtattctagcttgtgggtctggtttaagaaatctaactttggtttcaggattgggagggggtgtttggctaagcagaggagctgctgacgccactgggagggttagggctgcatggctctgtgcttggtgacaggagacctcctgcctgcccttccccttcctgcaaatgagaaaagaaagacacttcctgaaggcaggggaaccagatgggtcctgggcctccttccagctctggtactccctagaactcactagcatacactagacatatgccgcca

SEQ ID NO: 34845 - DNA, 1206 bp, Mus musculus
gggtctggagttaatctctggatgaagactaacccgaatcactgttgctatcataacaaagccaacagatttctggggggggggggggtaatgattgctgagtgttccgcatatctgtggcctatggggagactgactccatccccaccgggttcctgggtcaggaaggtagttttcatttgttttcaggtgagagagtatgtcctcggtgtggggtggatggatagatcctcagtttatcccatcttctacatgtatgcaggtttattgatttggccttgcaggttaagtagtgatttaattcttctttcattgatactgttgtgtaagtgtattgatgatgatgtgtgtgggcacccatggcacatatgtgagtgtattgatgttatgtgtgtggggggcaccatggcacatctgtaaagctcagatgaccacttcttggagttggttccctcctccctttacatgactgccagggatccgacttaggtggcaagagcctttatcttctgaactatctccctagcccttaagatacagttggaaattactcacagtgctaaactgctgcttcctttcccagctcagaagataagataacagtccacttcaagaaccgagatggcgagacgctaacgaccaaggggaaaattggcgactctctgctagatgttgtgattgagaacaacttagatatcgatgggtttggtaagtgtttctgaaattttccaggtagccttcggaataagttacagggtttatttttgttttttgactttaaactgtgatgttctaaggaaatattataatttaggacatgttactctttttttttttttttttttggtaaagattattagagtagaggctggagagatggctcagtgattaaagctacatactgctcttccagagttctgttcccagcacttaggtcagttgccttattgcctctgattctggctcctaggatcttataccctctcctgtcttttcaacacgtgcacacatatggcacacacccaggcagagacatactcacatatacactaaaacaaaccagatggataatgtagtaacactactgtttacttctggaaaggaactcaaatagccacttggctcagaggtctattgtggcccattgcctactgtgtgcctgtttgctgcaagcccgagcagatgagagatcagctcagaagtagt

SEQ ID NO: 34846 - DNA, 1104 bp, Mus musculus
atgtttgttttatatttatttattttatatcttagtacactgtccctgtcttcagacacagcagtagaggtcatcagatcccattacaaatggttgtgagccaccatgtggttgctgggaattgaacctagtcagtctcttaaccactgagccgtctctccagtacctaaaaaaatgttttcttaaatgtaaaatgaagaagttgaactggagatggctgtcttacttacattttagcacatatttacaaatgatgcttcatttgtctttctgactaccttagtaactatatatttaaaaaatattttaggtcagaattgaaattcaagataatatgttattttagtaccattttacacttgttttagaaattaaaattttctcaacttgcaaatatttttttaaaaatatctttaaaacatagactactaccacatgaatacgtcttagatatctttagaattacctatcagtttacagctttgatgatggtagaggagaaagctttctcagcttttgttgtctgggactggcttgcctaggactgcatgaagaaaatcgaataggaccagcagaacctaaacccaggctgtgaaggactctgacctcactaactagttccatgccttcaggcaagcctcttaaccacttcttcctttctttttagaggtataggagttaggagttggaatactaaagtaggctggggagaaggcaggcagttaggagaattagaccacgtctgtaagtgcctttaaagtgagcatactgcagatgtaagatagtcttgtcttctgcacttcacttgggaactgcgtaagttgagagagagagagagagagagagagagagagagagagagagagagagagattactacactattaagctaatatatataataaactttttttttggttatttttaaggttttaaacctgagtgtgtgtgaacttggataaagttgtatcctttgtcacatattctgttatgaatgtagcagtatcagagaggctgtttccataagacttattagggatcttcataatgcattcaagttattttagtgtagtatttatttttttaaatatttgtaacttttac

SEQ ID NO: 34847 - DNA, 2496 bp, Mus musculus
agagatgaaaccaagaagacacagaacgatgttcttcacgctgagaatgtcaaggccggccgtgataagtacaagacccttcggcagattcgacaaggcaatacgaagcagcgcatcgatgagtttgaagccatgtgagagctgttcttgtgatccatgtccttcataagctgaaccaccaccagagaaaagcaggcctgtgcagtgcagatgcaatggaacgcatcccaccttgccaaagcactcataccagtcgactgtgctcactagcaggacactgaagggtgtccttcatcattaaggcagtgtgatgtcatgtttggtcatttttcttttgtccagggaatggataatgacattctgtcacccacccttttgtacatttttcactttttgtttgtttcatctttttcagttgaatattaatactaatggccacgtctgacaaatgtgtgtatgtgctttgagcactgtgtacatcttaggataatggtggacatttcagtgcatgtttagctaatgaacttagttttctttgccctttccatgttgtaggctacatacatctccatgttcattctcatgttttttgtcagtgtgaccttctcatgccctgtcatgatagagctgtaattctggtgtcacacggatcacttactggaggtgtataatatgagatagtgaggcagacagacagacagacagacatgggactacatcataagatgattagaatgttggacagcgtagtatgcagccagtggttagttattacaaagatcccttagttactgtattgtttgctttccttaagtgcagtcatctctgatagcttgagtgatggtgtttcaaatcctgtagtcctatggtggctttccttgcctgttactttagagatctagccactaggcagtcgcttctaagaaaattattgatgaagtggccttgtaagtacatggtctctgaaaaaaattcaagttttgttcttaggatgtccaatagaagataactgtggatgataactaattctaattgttgaagggggaaaaaaacccaaaccttggcctttctgcaagggcagcatatggaaacatcaactctgagaacaaaatactacctcactctttacgtacgtggtgactgtacgcacagtctgtgctgcatgtctgtcacccatacgcagtctcaatcatggccttcactgagtgcttttgagatcccagtgctaatgttttaactgcctttctgttgaactgtggggctctgatttgtgtctagattattgtatattctcactggtatgctgttccctggggggtgttctgtgtccgacgctgagtgaccctttgtgagaaagacgttgcctttgcagtacatgaaacatcccattctttgttcttgatgggataggggtcgttattgtagcatatttggtttctaaatcactgcttatttttatttgcaatctctaaaaacaaattttatttcaattacgtcttactgaagaagtctttccagctagaaagatgttctgacactgtctgatcgtgaagcacctgaatttacagaagatgcagaaagcctcgttttctctgcgtggttcagctactttccatttggtattatgcactcaaacttaacatttatctattaaaattgccatttcattaagcaattttcacgcacagtagattcaacttgttttttgtgctgttttttgatttttgctgacttaaaaaggattaatttgggcagacattataaaaaggaaagggttaatatatttttggactctgtaggacaaaagagaactggttaaccttgaagtgactgttgtacagtggctgtgcacgtgcttcagactcatttgcgagggaatgctttctgtatgagagggagacggtaggccttaccactcagacctggacgtataagtgctcacttttccaacacatcacagcgatagtccttattgctaaaggacttggcttccctcggagttttactgatttatttttttctctttgcattgtgtacattatcattgctacatcagttgttacagtgttgaaaggctaccagttatatttgctgttaatagtctatttgtagattaggattaaagtgggtttaatccatttttatagctgtatgaatttttctaaacaggaacagccatttgcaaaatgggttttcatagtgattgcatcaattataacatttatcattagcagttgagagcacatgttcatatagcaatgtaaaaacctactaatgagtatttggtaatttcccattagcataattttatgttgtacaagtaaattacaattccatctctaatcttggataatactggttggttaacaataaagtgacaaaagctcccgccttggaggtccgctgttgttatttaacgtggtttcgcacgtagctcttggaaggacagtctgagccatgaaccatatgaactgaaccctggatcctcaaaacctt

SEQ ID NO: 34848 - DNA, 1259 bp, Mus musculus
cagtgccctgcacatgcctggtattgtggttactttctgtctcacaaaatgtcattttaccaactacctgctctacatttgggttattttgtcccattataaatgtttgacttcatgctaatgagttaattgtttatgaaatgaatcattggatttgttcccaccagtgacaccaagaagaagcaggaaacaaggaagagaaacaacactgaagacgatgatgtaagaccaagaagtcgtcatggaaagaaggccaagtgggaaacggtagaacctttggatacaggcctgtctttagcagaggatgaagagctggtgttacatctcctcaaaagtcaaaactagacattctctgtgccttcctgtactttgatacctctggatattactatgtgggcaagaaattgaaaacagctttggaaaacagttttgagttttgaaacatcaaggaacgtactcagaataaggacgtattgtatactgttagaatttatgtataggttcttattccccaccattggaaatgcttgttttgtttattttcacactgttgaagattaaaccaaggccttgtacatggtaaataagagctctactcctgagctgtgtacctagtccttgcttgtttgttttacaggcaaggttctggatctgttgttcatttgttattgttaagtatacataataattttatgtatatttcattatctccaaagaaagagtataatagactagccctgacaaagaattttttttaattgagttcataaaaaaataaacttatttcttacaaaatactattgtttttattgtatccagtgatatgaaagacactcaaagatagattcataaaattaaaacgtgacaaattcctaaaacaagttttttgtattgttaattagcctgctcaaatgtaacacatcacactcacatttggagattgctggcaattatttataaaatctctagacatctgaagacgttcttcatgtgctctttagtaggtatcatgggactccacctagctccttatgagaaaatgagatagaacctctgttttgttaccaatactataagtctttaaaaaggaaatgtggagaaatctgggtattgacatgaaatgattgattttgatgtagattgttacacttgggattcttttcctaaccctttcttcctatcccattcacaatcaaaactaatttttagtactagcaataaattcaacctcttaaggaagaagatagatggtaacttgg

SEQ ID NO: 34849 - DNA, 1192 bp, Mus musculus
tatacctatcatttcctggtgtggctccttggactcaagagacattatccttccaacatatgatgtcacccactccacactcgaagcaatgaggggtgtcacaaatgatctcctctccgttcagggaaacacaggtaagttcagggaagaaatcttaaaaggtgaaaggagtgtttaatcagaaagaataaatgcatatgcttaatcagtctttcttccaaccaagaaaaatgtctgcctagcatgtctaagggcccagggtccattcccagcaagacaaagcaggggaaaacggctgaaggagaatgtttagggtgctcccaatttgaaaattaaaaacacatagtttgggataataatgcccaagcctgtattcatggagtctcctttgaatttagccatttttaaacatctttcaatctgctctacacttggttatatttgcatgaaaatttacagcaaaaattaaagatatttaaataatgtgtatatttggtaaacttgtcacctaattctgactccagtgctttttattattgcataaaatgagggcaaattccaaaaagcgtaagaggcttgtgaccatggtgtgctctgggcattaggaacccatcctccatcgctctgtaaggaatcctcttacatctgtgcctcccgagtctttagaactggagtccttctctctgtttacggttccttccattttgatacaataccccccccccttttcgggaactcactgggctgcaccacactttgttttgtcctttcgttgctttcatgtcatttgggggacaagatcagagatttgggcaaagtacccaaaggtgagaaaaggtaataaaaataagatgaagacgataggaaataaaagtgggcctactttcaatttgatgacagtgaatttctgacaagtaagctgagaagactggatccctcccattttcatcttatgatatctctgaggcgctgacaagtatttgaccaacaacatcgttcttttagaatagtaagatattttgtcagagattggaatttatttttctaagacatttcccttctgtaactggcatggttgctcatgcctatattcctagcatgtggaagccctgaggcaggaggattgttactagtttgagatccttctgggctacataacaagcagcagaacagccaagttcctagctcaagt

SEQ ID NO: 34850 - DNA, 1134 bp, Mus musculus
gcttgtttgtgcaccctagtggataaaaggctcataaatcactgggaatccgtgggtggcacgctcaggtgcactggcttgcttctgtctttatccaagataaaagtcgaattcacttacttttatattcaattatgaagggcaaagtgtttggggaggctcgactgtctcctccctgtgttgtttctcctcttggtttttttggttttttggtttttttttttttgtttgtttgtttttttgtttgtttgttttttggtttttcaagacagggtttctctgtatagccctggctgtcctggaactcactctgtagaccaggctggcctcaaactcagaaatctgcctgtctctgcctcccaagtgctgggattaaaggcgtgcgccaccaccgcccggcaagaatttgtatctttaactagatcttagaaatatcagcatgacaaatatcccatatggacatgagaagaaagactgcctccctcgcttctacctctttaaccacaggttcagaaagaaaaaggtattttgttagagacacattaatttttttaaattgatgtcgtttgaggctgaatagtcctagcagaactaggagaaaaagaagttgaaacaaactaggcagtttctattgacttgtccgattctcattttgaacagtcacaccttggaacattgcactggacacagagtctttgacacacaaacctgcaggggacattttacatccaaaccgtaacaagtctatcaagaaatctaggttaactccacttgaccgtagcctttgaaatgagttttacatggctttatggttcattaacttgcacataccttaggggaaccagctggtttattaagctccaattccttcccttccaacttaaccaattgtccatatagtccattagccacttttaatactgaagtatttatcaaaatatatctggcttcagggcccatgagttaagaataaggagaaacccccagagagggactggagggagaaaggggacagtgatataattataccttaatttcaatagaagaaagttttatatgactttcaaaaaagggagggatgtaaggctataaagatataggtgtgtttatttgaataaactgtcaacaatgttt

SEQ ID NO: 34851 - DNA, 2664 bp, Mus musculus
cctttaaaagctctgtatctacagcagagaccagaagatgagtccgacctccattccacccccaatgcagatgatcaagaatgcaaacaaagtcttaggtgggatatttcaggaaggacctgttgttacttagattttcttgttcccaggccctccatggttgcacctcattgtaatctttgtgttcttttatcattagtgatactgaccagagtttcaacaaagtagctgagcgtgtcttgatgagactgcaagagaaactgaaaggcgtggaggaaggcactgtgctcagtgtgggtggacaggtgaacttgcttatccagcaggccatggatcccaaaaatctcagccgactcttcccaggatggaaagcttgggtgtgaccttcacccttaaactcgaacttcagaaatgacatctcacccaccatatttggacaggaattacttaagtgaataactgcttttgatccaattttctacttgactgatcaccacctaaatattagtatttctactctcttctgttagaggtaatggtcactcaagatccattcgtaggatacgtgctgactcttaggtcatgcttgtgctactgcagcaagaccgccgcatacacactgaactgcaaatggtgggggcagcagagtgagctttactgctggtgtacatgaagacaagttcgtaacttctgctctaaaacaacctttaattaaagcatgttttccagactgtgtgtgtgtgtgtgtgtgtgtgtgtgtgtgtgagagagcatgtcacacacattaagtaatgaagtgcttaataatacttttcaaaagggactctttaaaattgtaactatcactatatcatgggaatccctcattagaatgaatgtaggtagggctggagtgtggctcagtgggagaacatgtgcctaacctgtaggaggccccatattcagaccagaattgcagattcaagagaaaaaaaaaaaaatagagcatgttgaaagcaagcagtataagttgagccttcttaattcttaagtccaaaacatgagacattttcatgttgaaaactttctgacatattgggctcattttagacttgcacattatattaggcacacagctagtcttagctcgctgtctgcatgaatgcttcccaacctggaaacgtctaaaactgaaagcaactctcagcacacatacacacactcacaacaataaagtaaacaacttttttacaaagggaaaagtagattgcatagtttcagctatgtgccctggaactaacagatccacctcctggggcctcccaaggtgcggaaggaaggtcggtgttaaaggtgtgccacaccatattccactttattaatgttccaagtcctggtctgtcactaaccatctttaaacaccgcattgggatcgtcttgttaaggcaagggctgggtgggcggttggttgtattgttgattcttgtctcgggggctgattggtcattttgtcattttgaaaggtgtgctcactcatacacacaagcacacaccgtgtgtgggaatccagagtggcttggttaagaggggttcttccagatagtttgcttctgtttcaccctcagggattttactgacatttcttggctccggagctttagatctcaggagtagtgtagattcccgagagcagcagagtctttcaggccgcagtagacctgttctctctaatctgtatgctaatgggcataatgttgaattgatgccccttaaaatgaaagctcgacctgtgtctcactgtggtggcagggtaaagggagatggcatttaatgcttctcttgtgctgtttgcaagcctaataccacacgtgtgtgtgtgtgtgtgtgtgtgtgtgtgtgtgtgtgtgtgtgtgtgtgtgtgtgtgtgtgatttgtattgtatatacaaagccaaactactcttttggtttctgtaaactgctatgaaactgttctgcatttcagctttcttgtgtattttgtaagaattgttaaatggatatttggcatctgcttgactgcagtaaatcaggcggatgtaatgaacttagaatgtctgtaagcaagtgttgatgtcttcatggatggaggaagaaaattagctaatgatgtctagctaaatgaatttgtaatttgtttttgtagttaatccactgaagaggttggaatagttgatccattcttcacccttgaataatattctgttaacagaatatattcagatttcttcagtggctttgataaatctatgtcaaaatttttcagataaacccagaagctgctacttgaaaggtgaaaaagactgagttagaaaatctttctgacaggtttgagtgagacgggctgttaccaggagcccatgagtgatagttagatttataggttactaagaatcaggtattttctttatgctgagtacctgacatgtctatcagcagcacctctgattcttacaacaaaactttgtaatattcctgacggtgccacagattatctggagaaaaattacttgcctgaggacagaagacattgcacatgtgttcctcacagaagctgctagaaaagaaggaggcagcatgtctgtctgtctgcagtaaaggaggcagcactcctcttccagccctatgctgctgtacccctcaaatg

SEQ ID NO: 34852 - DNA, 1217 bp, Mus musculus
ctgtgtttctgggttacaggtgcttatgaatccatgaaagggaaaagtatcttgtacaacttatatgacttgctagtgaatgagataagtcatataggaagccgagggaaatattcctcaggatctcgtaatattgctgtcaaggaaaatctgattgacctgagatttgattgacatattggtacttattttgctctcttaaatgttaatataaatttaatttttatgtaatctcatgtaattaaatataaatttaaaatttaatcctgttgaaaatacactatttgcagttttggtaagtgtccccagaaaataaatgtagtaccctacttataaatacttactaaaaatgtcattactgctatgtaaaaatatttatctcttaatgtctttagatatttctataacttattaataattatgagtccctatattttcagttgagaagtatttttctccccgatgattcatttaaaaattgtagcaataaaaaggtgttttttattttgcagctttttgatgcagataccagatccgtggagatttctcaatcttatgtgacacaaagggaatccactgattacagtgtaccttgcaaaagaaggaaaatagacgtaggctgggaagtgataaaagattatcttcagaagtcacagagtgattttgatctcgtgccttggtaaaatgttgtattttctcatttggtgtcatttcaatcatttcccccagaaagccttctttgctgagagttgttatttgacggtgcccagacctgctgttagtggcaggtgaagtgtgattgctgtagataatccctaaaaggctcatctgctgtgctagacaaggctacctttttagacatgtagacacggtttttgtgttttcctttttcctaactcttattttcattcatatttaaatgtgcacaattccacaatgacagattaactctgattaggatcagtagactgtatttagccaggccagttttctttgctgaaagggaccagctctagaaatgttaaccagcatgcctgaaggtacttagagacttaacagattgtgggagggggagggggaatatttttcaccttgttgctggaatatgtatgttattgagttgtgaagaaaagctatatagactttgttatctattgcttaagtttacatttattctatgcagttgacagttctacttcagattttatttattcttt

SEQ ID NO: 34853 - DNA, 1177 bp, Mus musculus
gttacttctcttagtaagaccttatttcttattaagaaattatattctttcagggatattaaaccatcagtattgctggggaatcagtacatgaaggagatatttacacaaacagagctttggttcttgctttctttggactcctttttgtcttttcctaaaaaggccaagctcttagaatgtttccccaatttatgaagacccttcgtatagtttagattttatctgtcatgtgattagttggttatgatcagatggttaatgatggtgggtaggcatttttgtagcacataaccagttaatcatataaaccatggcatcattgaacattttcaggtaatttctacgttgtttttgagctcttaagacaaagtaaagcagaacttaccaaatttaaccaaaaaattaaagctcaaattttaccaaagcatatttgagagtagaacataatgtctcaggtatttctagatggctatgcatttctataacaagtagcagtgatgcactgttttccagagccttttctcaaatacactatgcaagcttgtactgatttacaatgtatcatgaactatcatatctgatattcttttcccaaggcatgctagcacaattgatcatatttttcataggtcgtggataaatcatcttctttttgtttttgcttctgtttttgttttttcgagacaggatttctctgtgcagccatggctgtcctggaactcagaaatccatctgcctctgcctcccaagtgctccgattaaaggtgtttgccaccactgcccagcaattatcttttttgtctaaggcattgcttttcaaccttcatttcactgttataccctttaaggagactttgtaaagtttttctaaccacccttcccacaaatatttttaatctcacaaaaaaactgtacatctttttatattagatgtatatttcttgtattaaattttccgatttctctgaggagcagtttctaccctcttttagaatgctgccacttcttaggaatgaatgtgtgttctacaggaaggaaaaatgtttaggagtcctatttcataccgaccacctgtcataagtctcaagtgactgaatatacatctaggtgattaagcttttagatctctctatgatgaaaaacaatttatttggtggatctaatccaaatccaa

SEQ ID NO: 34854 - DNA, 1115 bp, Mus musculus
gaagaaccagccccttcagataaacagctctctaatgatgcagcgtctgttgacttaaatcctacggaaagcaagacggagccacttcagtctgccagtgctcaagagcccgagcccccttctgtgaaagatggagatactatttttctctctttgagtgaacataacagctgtgaagaagttgcactggttcttggagaaggtaatcctgtaaaaaataataattcgctttcttcagaatctggtggttcagtgggagtctctcctgagacccaaaatactgatggtaaaactagcaactcaacagaggtagatgcatcaagtattgtctctctcaaaattatcattagtgatgatccatttgtttcctcagatgcagagcttaacagtgctgtgtctagtatcagtggagaaaacttaccaacgataattctgtcttctaaatctcctgccaaaaatgcagaatttgttacatgcctatcttcagaagaaactgcaagtgctgttgtatctgttgaagtaggggattccggctccatggagcagaaccttttagtgctcaaacctgaggagcccatggtaaacaacactcagaatgaagatggcattgctttttcagccaatgttgcaccatgtgttcctaaggacggaggatacatacagttgatgcctaccacaagcacagcgtttggcaattcaagtaacattctgatagctacctgtatgactgattcaacagccttgggaccaactgtcagtcagtctaatgtagtggtattgcctgggagttctgcacctatgactgcacagcctcctcaacagcagttacagacaccacctaaatctaacagtgcgtttgctgtcagccaagctgtgtcgccaaacttttcacaaggtaacttgtaaaagcatatcggaggtgagctggggtatagtccagtggaaaagctcttgtacagcatgtgcaaggccatggactctatccagcactgcacagaacaagatacatgtatgtgtgtataatgtatatgtgtgtgcgcacatattttggagcttctctggattgcaatcttaattttcttgtgtgaagtcacagactaggaaaataatataga

SEQ ID NO: 34855 - DNA, 2204 bp, Mus musculus
atgttttgtaagtttatgatttgacacaaatgaccattttaaaggaagcatgtctcttgtctgaacattcatatatatactctagatttgtttttttgccttttgccctaaactaacgttgaattgggttaataaaacctgtctgtctttccctatggaaataaattctaacaaactcaaaaatgatgcaattttaataataaagagcctaatacggtgttttaggtgatttgctaagaaaattatctggcctagagtttattgtttttccttctcttcttttttgtttgttttgacagaaaaagaagctacctagttcatttccagcaggaatggatgtggacaaattcttgctctcattgcattatgatgagtgaacgaacacccagacacagagaccagtagctatttaaaactagtgtccttcagatggcgagtaggaaacgggccagagacagactgcgaacatgacctgcactttgactgtactgaggtttcactttatatctaagtcatgctgtttctgaagcagcttcctagtttgtaaatagactctcatggaatatttgtattctaaaagaacatacgcagaaatgtaagtaaacccaatctgcaaaactgtacagctttgacactgtatattgtacatgtgtatattgtgtaaaaatagagcttaaatcaacctaatattcccacactgtcttgattgacttcgcccgaggcttattcttctggagtactttctcatctcctttggaggaagatgataattattcttacaaattaccttcagccaatattagataagccactaagtaaaaaataataatgataaccacctcaactggttagtaaaatatctaatcagtaaacaacagttggatgatgatttccccctagagtcaatattttatcacccttcataaatttcagtaaaaactatatttctgaagttttatactttattctgatcatctattctctttgttttaaagagatttttataaaccatttattaagtgttctgatatttcacttacaactttttgaaatcttttacagaacattaagtggttagactattgagccataaaaatttgagttatgtagtagtcgagatttcttgattatatgtaaactttccctaagcactggggatacaaagaattgcactaattcatagactttttcacatactagtgaccaatgcacatttaatttaaatcttgtatgtaaaagcttatatggaggattgtcttctggtgtctttgaaagtcatatccatcataagatgtaaaaatgcaaatcatagttatattgtaatttagtttaccctgaaatgggatgtgtaaataactgtgttcatacataacctatagaaccttgtgttctttaaagtgttataaatagttactctcaaaaggtccttaggggagtgagaggtgccttctctgtgttggactgactcataaacaacagtcaagttgaaaagctggcctaaactttaaaggaatgacagaaattatcattaatacttgaccgattgtgcctagatattgaagtgttttcttaagttcttactgtttaaatatcagcatattaggatttttttttctacgggtgtatattttattaaaaagtcactttcttcaaccattttttgtactgggcctttaagaaataaatccatcctactgtaacaacaacaaaaacgtcttcaagatgtaaattatgtctttttaattgctagattttactgtacaaatttatattttgagaaatgttctatgactgagctgttctactcctaaggagctaactaagcatacagttactgtttgcataactcagtctgggtctgtcctacagttaggtttgaataaatatattttcattaactttaccagtttggatttatatttagaaattggttaaatttctttgtagcttagttaattctctgtgtttttcaggaattcatataatgcaggaaattacagattttctcctgtaactcatatctatgtgctgcataatgagaattcatatataaactaactcatgctcttttctatagctctatgtgtgtttttagtcagtgtctttcctgtaggccaggctggctttgaactcattacatagtccagtgactttgaagtcctggtcctcctcatctacctcctctaagtgccaatattgcaggc

SEQ ID NO: 34856 - DNA, 3447 bp, Mus musculus
acaccttcatctacatggcctagccgggccgctgctgccgcacacacgcccctgaaggcctgggcagaggctgtcccagccccagctggaggaagctttatttggactttgattacataaatattaaactctgccttaccttacaaaacgactctattttgccagtcacattagttagcatgatggcattcccttcatgttgcacactctttaacagcatgctgttttgtggagaaaattgcattcatgaagagcccattgtgaactttcaaagtcaattcaatttttacccacctagagaaataacatgtcggaagggtgagggtggggttctttttgcttcttttatccccttttcttcttcaaagaaatatacttgcacaaggaaggattttcagatattcatgcactgaaaaatgctggggatttttgtttgtttgtttgggttttttaaattctttttttttttttttttttatgaaattaaagctagacgtagcactaagctacttctgatgcaaagaatgaatcgtcaacactgtgctgggcaagggcaggcacacttgagaagacacgtgtgccagtgtcaagttgtttgtcaaacactgctttcactttagtgactggatcttaatggtaacctgaaatggtattaaatatttctaccttataaatcctgattttcaatgagcaggagagttctgtttagttatttgttgttaaatgataaagatttgggatttttcttttaaaccttgtacggctggagagcttgttttgaaaacatgaagtttataatgaatgttgcttcagttaaaaaatgtgtgggtatacgtacattattgattgcataatcagaatcttgaagcaaaaattaagtgtgttactaatacactcaattctcatacgtctaatatttattatactgtacctgaatttgttgaaaacaatgcagaaatattctgatgcagtgcagtgagagaattgctttcttaacctgtagcatagaattatttggtgattgaaagtgttgtgattagggatttaccacctcagttttctggaaagacattctctatttaaaagtaataattacctgccacttagcaggaagaaaggtgagattacaacctgcaacctgaaaagcactcaaagttgttagtcttaacatgagcagtaaccttgccaaatatgtacatatatttatatattttaaaaataaacatttttaaaatgttcagagggcaacacctaccttgctcctctcagtgatccagagcagtgactcaggactttacagagcagtggaaacttagagattgaggactcaagcaactgaagagaattattccccagcaggaaaaatggctccctgtggattttactcattgtggtgcacgtttcgagttttcttgcaaattttagaacttttgatgttaagtagtattttgaagtattggttctgaagctagcagaagatggagtgttgagaagcatacagtattatctatcctattaccacagagggctgtggatctgccctgctgctcagcagctggggtctccttgctggaaagaagtaaagtatatgttagatgtttaaggctttgataattatagtcatatatctgttgtgaaactcataggaagttggaagtgcatgtgtgcttgctgtgccctgcagctctgaggtgatggctaaagcaggtgtgcagcgcaaactcagtccctgctgctctaccacgtggaggatggaacatccggaatttagagggatagttttatcatgactgttcaatagcttggtgttggcaaattttcctgtcccaataccagaatgccaaaggaggaaacaatcaagggaaaaattttaggccatttaaaatgacaaaaaagatttgtcattttaaaccatcattttctttagaacatctttgaaatttctaatcgctttggtcatttaagaatgagagctgtgatgttttgatttataaaggcaaacttaatgcaaagtgggtaacactaaatccatagcaaagttttttattaaatttttataaattttttaatagttaattatgtcctaattgtattttggggaatgagcagcagtaaataccacagacttaacagtttcatccttttttaaaaatatatatataagagtgtaactactttttggtgtttatcaaaactatttagttgacaaggtgcctataccattgttgggattttctttaaatgttttatgaatagatttgataatttatctgaagatccagaaccactgacagcgcccctctctctccctgcagacttcatagtcttgctatctgagcagggccagacatgcacagggagggaaggagaggccagctcccactcacactgggaggcattgttaagtgaacggtaccgcaggctcagatttgagcacttctgtctacctaaggtggcgccatctgtaaatgctaacctgtcaccaactcacggccagagtaaggagacagggaacagatgcatgcagtggaaaggggagactcctggacgcgcagttagacaaatgtgaggccgtcatcagtctaataatttataaggatcctcaatcaaattctgaagtctccgactttcacagttcttggaagggatccctgagtttaccagcgtgctcactgaaagctctcactctttgtgcagaaatattaaagtctccgaaaaggtgaactgttaatcattcttattttttttaactcttcattaaattgaatatgatatcattagctctgctccaagggcaaattttcaagtttaatctgggtgaaatatttgctagtttacagaaagatttgctatcatatcaatagctggctcttctgtttttgtgtgaatgactgggatgctgacacaagttgtcccaaggtcacagttatgagagaaacactgttggagagcgttcctgtcatctgcactatgtgtggtctggagttcctaaggtgtagcctctcatcgtgacctgtacagttttgaatgtgcaccactacatacccggatggcactgtacagtttcccacggtagcagtctgtatgcagtaggctgaaatattttgatgaacgcttaatttttggattttattttttaagttgtataatttattttcttgcaaaataaaagtgtaatataaaacatttcatctatccagaaaatcttgatgttctaccataaaaatttttgcaacagtaaaaaattttggcaagccagggcagtatcatgtacctttaatcccagcattccagagacaggcagaggatctcagagttcaaggtcagcctggtgtactggtaagttccaggccagtcaggacgaacctgtctttaaactcaatgaaaattgtttcaattggagagggctgcatctgtcgtccagctgcttgggaggaggtggtagct

SEQ ID NO: 34857 - DNA, 1203 bp, Mus musculus
atccgactttgccatgcttagggtgtgcactcacgcatgtatgtgcacgtgctctctcacacaccagcaatgtttatcctgcccagcagtgctggcccacaactttaattggagcactcaggaggtagatgcaggcggatcttgagattgaggtcagcctggactatagagtgagttccaggacagcaagagctacaaggtgaaaccctatttttaaaacagcaattaaaaacaaacaaaacttttctcttaaattttagactaattatagctacatgatactaataatatatttcaaactcccaagtaacatttcttcagaatcttatgactgaagacctagctgccaatagtgcctcacaccttgggaggcagagggaggtaggtgtcttgagtttgaggccagctagggtgtagtgagatcatgtcacaaaataaaaaacagaaggccacagacattaatgaagaaacaattttattcttataaagtaattatatgaatgtgttgtgtcctttcagagttacatttgatgttttccttgatggacaaagttcctaatgggatagagccgatgttgaaggacttggaggagcatattataagtgcgggcctagcagacatggtggccgcagctgaaaccatcactactgtaagtagttccaaagccacatctacaatagtggttgaaacagcagactagtaaatcattcagatttacttttaagaaaataatttcccccaagtttaaaccgtattttcttttaaaagctaatatgaaaacattctgtttccaggactctgagaagtatgtggagcaattacttacactgtttaatagattcagtaaactggtcaaagaagcttttcaggatgatcctcgtttccttactgcaagagataaggtgatcttctctttttggccattttgtataaacgctgacactgtagagttgactgactgagcagtggcgtcatactgctgagttgagaactaagaattcaggaactcagattttctgtagagcacagcagctctattttttacattttgcttagtctttttgtattattgtgaactcggattcaaccaggaagcttctcccttcttcattttttccagggatattttcctgtgttttgaaggttcctgctggttagatttttcttcattctccattctccctttaagaccagccttgcta

SEQ ID NO: 34858 - DNA, 1197 bp, Mus musculus
gtacaattttgtttttcagcgtgtactgagccatcaagatgacacagctttgctgaaggcatatattgttgaatggcggaaattcttcacacagtgtgatattttaccaaaacctttttgtcaattagaggtgactctattgggtaaacaaagcagcaataaaaaatcaaatatggaagacagtattgttcgaaaggtatgtgtctcacccttttgtttcttgatgttacctaatgccctttatgtcatttatttatttatttgtttggttatttattatgagtacactgctgctgtcttgagacactccagatcagatcccattacagatggttgtgagccaccatgtggttgctgggaattgaactcaggacctctgaaagagctgttggtgctcttaaccactgagccatctctccaccccccccccccccccaattaggaagaaggtgttcattgatttatgtcggctttgctctcacatgcagacactttatggctgttagctttgttttttcatgaaactttcttttgcactcaaatttttgtttcagctttccttatctttgtatgtcctcttaaactgtaagtctgttttcaaacataacctcctctttttttcttctttagcttttccttcagtatctttttgttttattcctttgtactttatctttttatgaattatttattcattttctctttgaaaaaccatttcttctaattttccatttaattatgctgaccaactgttatctttatagttactttatgctagtttaaacttggtatatactgtgttaatttctttacagtgcatgttttctaattaaaaaactgtgcccggtacctacttgtgctttagtcctgtgtgtcacagggtttctttccactctaagatagttttttaaatttgtcgacctacttaccagttaccttcctactagtgagacatgagtgaaacttacacgcttctgtgtgagcacatacacgcttctgtgtgtgagcacatacatgcttctgtgtgagcacatacatgcttctgtgtgtgagcacatacacgcttcagaagctttaccactgagctgcagcttcagccttaacaaaagtgacaaataaaaactgccatttgaatttcaaaaactgtctgctgtgatggttaggttaacagaccagtaccagaattgtgtggcctgg

SEQ ID NO: 34859 - DNA, 1139 bp, Mus musculus
ctgtacagatggttgtgagccaccatgtggttgctgggatttgatctcaggacctaggaagagcagttagtgctcttaaccactgagccatctcaccagccctagtcccaacatttttgaagctgaggcaggctgatctctgaatccaggccagtcagggctgtcattagagcctgactcaaagcaagagagaaaaagaagtactgtaacttcatgacaatatactggaaagaccagtaaccaactgagtgaagtcagatgccagaaataggaattttcaaaaagatctttgtagctttacctgatcttggtactcactgtgtagaccaggctgctcttgaacttaagagaggattctgggtgttccccacaaggcctggctgatagtctgattttctatagctagtactgttgtaatatgaaggacataataaacagacatttgattctgttatctctacattgtcaaacatttacctattttagttgttggaacttttggggagagggattccaaatactcatattttgaaaagtactaatcataaaatggggagactgaagtttgtctttggaatatgtgaggaccagccagggtctgtctatgatttaatatatgggattattaaattcagggctgttactaccttgagtagctatagagcttactggggagtggccaaattagcatattttttgttggactagtatattggcttatttgagaaatgccttggacttatgcaagtagattttaccaaagagagaattagcatgtccatcggtcagacaagagtagtgtgagtcagtcccagatctaccagctgtacctgacacatgctgaataatgagcccgagccccttcagggggaaaatctcagcttgcttgtgacttccagaaaggtggtttttttgttttgtctcatttgtttggggttaggttgttttgtttttatagttgacagaattcagagaaataactactagtacatttgagaaaataagattagaaactttatgaaatttctaagaatctgatgcaataagatctgcttttatattggcattttattttatttgggatcatgttttctggttagatcaagtgaactgtcaattggattttggcaattttttga

SEQ ID NO: 34860 - DNA, 1204 bp, Mus musculus
cagaaaagcaacgcccggcttcttagcattattgtttatataataaaatggattatcagatacaattaaatactatacacatctggcagtcataacggcatataacttcaatcccagggtatctgatgccttcttctggccgccatgggcactatacacatgtggtacagagacgtacatgagagaaagtggagtggggagagagagagagagagagagagagagagagagagagagagagagagagactttttatgcaagccaggtagatataagctataagatcgtggacaaaccaaagattctctacacattaattatcttacttagaaaatggcacttgccaggcgtggtggcacacgcctttaatcccagcactcgggaggcagaggcaggcggatttctgagtttgaggctagcctggtctacagagtgagatccaggacagccagggctatacagataaaccctgtctcaaaaaacaaaaacaaaacaagacagaaaatggcacttgagtctacagccatatcaccctgaacacgcatgatctcatctgatctgatcttggacactaagcagggttgggcctagttagtacttggatggaagactacctgggaataccaggtgctgtaggctaaaaaagaaaaagaaagaaagaaaggaaggaaggaaagaaggaaggaaaggaaagaaaagaaaggaaaggaaaagaaaagaaaagaaaagaaaggaaaagaaaagaaaagtaaagaaaagaaaagaaaagaaaagaaaggaaaagaaaaaagaaagaaagaaaatggcacttgagaggtggagtgggaggagcaggagttcaaggttttaagggaattttaagggaatgaccacaaagttagttggagacaacctggatttcatgagaccatttttcttttttcttttttgttttgttgttgttgtttttgagacagggtttctctgtatagccctggctgtcctggaactcactctgtagaccaggctggcctcgaactcggaaatctgcctgcctctgcttcccaagtgctgggattaaaggcgcgcaccaccacgcctgactgagaccatttttcaataaaataaatttagtttcataaaaaataagaagctctttcctccaatgacacctactaatagtacattgaaaactatttcagggaaaagtgatgggcaaaaccta

SEQ ID NO: 34861 - DNA, 2060 bp, Mus musculus
acaaacaaacaaaagccaaggatccagttagctgtcaagccatctgagtccagtatttacctgtgtataggggagggctggggtattgtcatctcctatgatgacttccagaaagagactgtgaaggtagatgtcaaagaacagctgacaacaggccacagccccttgcttgtatgagggagtgcaactaactgcctgttttctctccacagttctcaggactctacatcctgtcgttcacagtcatcatggttggcttcatcttgtactgttccaccccaacgcgcacggtagagcccccagaaagcagcgtgccccctgttaccagcatcgggatcgacaatttgggactgaagcttgaggagagtggtctcccggagacccactctgcagtcttgtagctggacaagccacagactctggcatgtcaccaggagagagcagaacctgccactgccaagggcgcatttgaggcgacaccagcctcagaggcgaaacccactgcattggattacatccgtggttagattgtagaaaggagcactgaccagtggttccaaactagaaatactaaaatagagcagagagcccaagggtagtgagcgcgtgtgctgagtaccagtacctgtcagcgtcaggtttcagagacacatgtaagaagagaagggcttcagggctgtttaggtagttaggagttgggacagtctgggatgttggtgcaataagattcctctgttggaagcttcacgttttcatcctgctggggcagtcactgtccatggaccttgtggaatttagacacccatgaccgaaggtccctggtggcaggtggtgggaaaaatgggcggggcagcacttgagaactcccaagataaactgtgacgactttgaaagcagctaatgagtacaggaatccaggaaccctctcccagtcatatctctcaatgttttataacatgtctctcccctttgtccctcttgcttgtccctaggcacgtttgctcctgtgttctgagttctggagcaaactgctctcaaagcctgttatattgggcatccctcccattcagtgccacactatacgctgagagcaaatacgctcaagttacccttgggtaatgtcctggtgcccgggaagagtcatcccaattggcctcacctcaccaagccacagtttagaaaattaacctgctgcaacttctcatagcaaggcaagagcttgagaacttggctgctatctctggttggaaaaatgcattattgttaaaaggaagacgcactgctaatcattccccactgaagcgaggaacactgaccaatggttccatgctaggaatcctacagtaggttggtgctggggttctggagtcctgactgtaagaggagagtgtcttccttcttcccacaggtttacaatgcttgtaggtttgtgacaattcctcagtatggtgtcaacatgtagccttagcataacatcagccaccagagtgccgccttcagaaaactttatgtaaattgtttttgtataagaataataaagaaatttggggtaagtgttcgtattattaaaagactttaaactcatggaagtagaatcacaatgtgtttgtttgtttgtttgtttgtttgtttgtttgagattaacctgttccccttgcggagttctatctgtttgattcttgtttttatctttacatgtgtgtgtgtgtgtttgcatgtgtgtgtatatgatatatgtatgtatgtatgtatgtattcacatatgtgtgggtgtgagcatgcatgtgttatagctctcaaatggaggcctgaggacagctgcgggtatgagttcttaccttcttccttgtttgaggcagagtcttgtgtggtaagtgtggtaagtgccttgcctactgagccatcttctcagctcctgtttttgagactgtcttactacatggcccaggctggttttgaatttctgatcctcctgccttagcctcctgaatgctgggattgcagctgtgcagtatcatgctgctttccctgtagatattaaacagcttggtacattcaca

SEQ ID NO: 34862 - DNA, 1277 bp, Mus musculus
agaaaaacattgctgataaaattaacctcatagaaagaaaattattttttaccaccgctaatgctcattttaaagttggatgtcctgttttagcccttgaagtactttctaaaattcctaaagtaaccaaaatatcctccttaactgcaaaaaaagatcagcttgactctgtttctggaaggatggagaacgggccatcagaatcaaaaccagtgagcaggagtgatggtggttctggggctgactggtcggctgtgacttcctcccagtttgactggagtcagccaatggttacagttgacgaggagcctcttaggctcgattggggtgacgatcatgacggtgccttagaagaggatgatggcggtggcttagtaatgaaaactacagatgccaagaaggctggccaggagcagagtgcctcagaccctcgtgctttgctgactcctcaggacgaggagtgtgctgacggcgatactgaggtcgatgtgattgctgaacaactcaagttccgagcttgcttgaagatccttatgactgagttaagaactttggctacaggttatgaagtagatggagggaagctgagatttcagctctataactggcttgaaaaggaaattgctgccttgcatgagatatgcaaccatgaatcagttattaaagaatattcgagcaaagcgcattctacagtagagactgagcgtctggatcaggaggaaatggtggacaagccggatatcggttcctatgagcgccaccaaatagaacgacgacggctgcaggctaaaagggagcatgcagaaagacgaaagctgtggttgcagaaaaaccaagatctcctgagagtatttctcagttactgtagccttcatggagcccagggcggtggtctggcttcagtaagaatggaactcaaatttttgctgcaagagtcacagcaggtatggccatcacttgttactttctgctagttcaggaatttcagtagctcttccaggtaagttgcaaacttttttaaacaaacgtaaacattttcagctcctgtagtcctgggaggcagatatttgttcctaagtggctttcttaggtggtggctctagaactagaagttggtcttgtttgttctctgttgctttgataaacactgatcaaaccaacttgggaggaaggtttaaggaatttagttcattgtcaagagaagtcagggcaggaactcaaggcaagaactgatgtagaaacccatggaggagtgctactttctggtttgctcttaa

SEQ ID NO: 34863 - DNA, 1600 bp, Mus musculus
caagaatctttgtgcctcagcccctccgtgctggggttggttgtagcagtgcaccatcatgcctgacttgggagtgtttctcggtacgcacctcatgggatttccccaggcctcgcagggtaggtaggtggtgtgtgatcgaacctctgcctgaaatcagtagactggttagtatcttgctcagttcctatttcactgagtgctttaaatgtccttgttttaatttagtgtggtgatgaatgtttatttttctctttctattctcagagcttaacaaaagatctgggaggcaacgcgaagtgctctgacttcacagaagaaatctgtcgtagagtcaaagacttagattagcactcctgctggtggatttgctgcagtcagtcaatcactccaaaaggataccctgtaatcctccttgagggcgcccaccattggtttgcttgcttcttgacagagtacgttttttgaatctggccttttcttaacaaaacccttgcaatggatgcacatgatggccccaggccttcattcaaagggttttcccaagtgctggttgtatttattgtccgtctggtaaaccttattttgtaaactgtaagtgaactgtatcatttatcattgttaacccattttacacttcaggcaaaatcattttcctcaactgtaaatattctgatacagaattaataagagaagatatttaactttttaacaaaagccctggatttttggtttatgaaaaacaaactgggaataaaacagggttttaacaatcgcacaagataacattattctaatactaatgggtacaaaagaaatttactgggaaagttcacagcaaaaaaatggtatatttcttaaaaatatggaaataaagtatttgtcctatacatgaattactattaataaaaatgtaagctccaagaaatccataatgaatgatgtaattttgttactacatcggtaatccttgtcaaggccccggatgctctctgtgtatttgattcttttgttaccttgagattcactattttgggggaagagctttcagataagggagatcactcctcactagacagatcgtcagcattgcgagctgtcagccatgagagccagccactgcagatcccctcccacgtggccacactccagccagtgctgcaggtgaccctggaaaggcctggctgccccttgactttccctaaagcaaccagtcactgccttctgccccagtagcacccattacagacttaattgccgaggtggagctgactcagcccacgctcatacaaatcaggccaagcgggggcctgtgttaccagctgctgaccatcaggttctgcccctcattcttcccacagcctctgctccacagcatgaacctagcctttggcccacaccaaagccaagctgtcttcccttagcccttgcactagtttgcaaactcgtggctttgcataatgtaccctggtcccaaggggatttcttaacaacagatgtccctgtctgggtcatttttttaaagcttttatttggacttacaatcttctgtgtattttactttaaaactgctgctttccctgtctcactggattgttct

SEQ ID NO: 34864 - DNA, 1146 bp, Mus musculus
aggggctgaagaagtctacaatttgcagatgtttagcaaaacaatggccagattgtatgagtccttctccaaaacgctcctgctttataattagctaattaggacatggtatgttttcatctcctggccctggctaagcttgacaagtttttccacatgagtgtgcatcatgtaagagttgtgaggctgtctgggaaggcagcctgttctatagcggaaggtgttactctccttagagctgaacctttcttttgtcttccattgtctgcttggttttgtagcataatgggaaatgtattgtctagtttcttattactaagtaatttatttttaaaattacctatcttatctctcaccctctcctctaccattatatcctagtaaaattaaagtatctgtcttaccttcatatgctcctccaccttcatatcccagtaaaaccaaatatctgtagatccatctctaattggcttttttttacattgacagcaacctggaatttttaaaccatgaagctgggtattatgatcccagtacttgggaggcagagccaggtggatctctatgagttcaaggccagcctggtctacatagagttttacgacaactagggctacctagtgagaccctgtctcaagaaaagggaaacttcctctgatttctccatagtttgcctaccacaaagctcaggtgaatctgtcctttgtaagtcaagagattgtgtgaatcatacctcaaggactagactttggctgcttcttcgtaaaactgtagataagtatacttagagtttatagccctactgctggctggtactatgataccattctgctaaagattacaagacttggccaagatccctgaaaatgtattaagtcaaatctggttctcagcttataaaaagtgacaatttttcctaaaaaagaaaggagtttgaggccgggcagtggtggtgcacacctttaatcccagcacttgggaggcagaggcaggcggatttctgagttcgaggacagcctggtctacagagtgagttccaggacagccagggctacacagaaaaaccctgtctcgaaaaacaaaaaacaaacaaacaaacaaaaaaaaaacaaaacaaaacaaaaagaaagaagtttgagagtctga

SEQ ID NO: 34865 - DNA, 1176 bp, Mus musculus
gaaagatgtttggaatggaagtgaagccctcatatggcctaaaccaaggttagcctccaatctcaaggcaagggcacggcctgacagtgataattcctagtaattacacagttaactcagccacgttcattgtgagagagaaaattggctgtatccagttcagtgcacagccaaggaaatgagtggtgctcaggagctcttggctctttgggaaagggtaaatattgaccttgttgggggtaggcatgagtggtttgtattgcagttttccctacaggctcctcctggaagcatagtgctggcccaggcaggaatacacttcatggcaggaccctggatctgaatctttgaaagggtagttgattgtcgttatcttagagagaagtactattccatagccagaggaagtggtccacttagagattaggctccatccttgtggaccttgggctagtctagattcagaaggaagagtactcactccttaagcattccttaccaaaaaaatacaggaattagaaggctttatggctttatttctttaatttgcaggtttggggagtaaaatataatggaaatggatcaaaaattgtatctgttggagatgaccaggaaattcatgtctatgactgcccaatttaaacaccagcatcctcggggctagggcctcagactacacagggttgatcatgacattcctcagattttttggcatacttaaagtacagcatatattgtagaacttttgtagatacaatataaatttttcctgttttattggaaatgttcttcatattttaatgtaaataaagcattcttaatgcaaccacctgcatttgtgaacgtgctgttcttttcctaggagagcaattgacggttagtgaaggagagtgcctgcctgagagcggagatccaggtgctcactgggtagaaaggcagctctctgttcccaggtgataccagcctatttcagaatggagttctgaaggaaacaggctgagtgcactggaacttggtgtcatcctacctgcctgagcatccctccatgtgtctatttacaatgccccctttaccacaccctctctccctgttctttttagagaggtctgacctactggcagcctgccttagcccttgtgggctcaagactagtggacagggctaaacactgctgtg

SEQ ID NO: 34866 - DNA, 1168 bp, Mus musculus
gggttgacatactttagttaaaaagaacagtttgccacaagtagaactactgaagctgaaaaacaaattctgttcatttagagtctttccagaactatgtgcttgatggattaggtttttgttttagttttggcaggtggtgctgtgtacacgctgagttttatggcctgaattgtacttccatcatggggtcagttgtgctaaggtctgggggcctgttaaaacagacacatctgggacatatcaggattaatctttcgggcctgatctaggactcaaacccctttcttttgaccaggaatcacaggcttgacttttaattcctaattatgaaggaagagtctgttagttccactgggcaagaataagaccactaccacagtttttgaagcaagctttattaaatactgtctaggacgacggatactggccacgtctgtgccggggaatcccagaacatggcaccgaattacattagccaggggcttataaaggcaaaccccacaagacaagtacttcccgccttcatgcatgcaatcaggagcaagcatacattctgacgtacttcctgccttgggtgaccaagcacagactgtgaagctggggcaaccaagcttgttgacaagtgagaacacgtgcatgaaccacagctgccagagttccaggaagtcatctgcccttgggcaagtggccttacaggttaaaagtattttttttttgtttttgttttatagatatctcatgtacagtgattttaacttaaaacataacttcagccctcacagggtccctttgcagtgccctccaggcctgttaatatctaactagatactgaacaactgggctcttaatctgttcccagggtggccaaattgaatcttttgtaaacatgtcagtaagaatgaagatattctaaagagacacttatgtcactccctttggctaacaggctattgcaccatgggccccagcaaattaaaataatttcttcagaaatatcaagctgagaggtaaggaaaaaaaaaaggctaaagcctcctgtcagccagaagagagccaatctcctgaaaagacattccaaacagttctgactttccatatagttctgacaacttgtaggagagactgtagcctagacagtaataaagggcaagaccacattcaacag

SEQ ID NO: 34867 - DNA, 1204 bp, Mus musculus
cactctgagtggtgcctgcattttaaggtgtaacaggtgttctaatcttattctgttgctttgacaactgccatgcctgaaagtaactaagggaaggaaagggtttatttcatcttacaattccaggtcacagcccatattttaggatgggaactcaagcaggagcttgaagaaaagctgtctagtatacactctggcttactttcttgtccaacccaagactgactgtccacagtgggctaaatcttcctataccagttgataatcagacaatccccaatatgggctactctgatctaggcaataactcagctgatgaccccaggctgtgtcaaattcacaattgagactaactgggacaatagggttgtcttcattattgtatttaatttctactccatgcttttcaatatgtatttttactgttgtactttttacagtgtgtagacatgacttcttgtttacggtaatattttatcttgaatcagatattctgccttactcaatacgggtcctattggaagctgctgtacgaaattgtgatggctttttaatgaaaaaggaagatgttatgaacattttggactggaaaaccaaacagagcaatgttgaagtgccctttttccctgcccgtgttgttcttcaagatttcacgtgagtgacagcattgtattgacagtctctaatgtgatggccttgttcccacgtgtgaaaccccagtatggaatgatgtggttaaaaatctaaagttattattaattcctccacatatatcgccttctatcacagaataaaatccaaattctttacagtatcctgaaagactgacccttcttgttctgcctgtttatgggatatttattcgaagtgtgaattttacaataaatgttggaagagagtaccctgttatcactcagagttatacaagtctagcttctgtgccactgatcactaatatgtggtaactcccatatgttgctgcttaatacatacattactgttctgtaatcagtaacgtgtcctgtttgccttgtatccgtggtatgaagactattgaagccatttggtacatgtttgtttacacacacacacacacacacacacacacacacacacacacacacggatggatgaatgtaaaatggtaaaggctattttgaatagccttttgagatactgcaaggactgtaggggacgaggaagg

SEQ ID NO: 34868 - DNA, 1197 bp, Mus musculus
ttattgcatgggagatttaggattatgttttaaccctcctgaataaaaactactttaatttgggatggctgagagagttgagacagtatctcactgtgtggccaaggttagccttgttcctgtcagtcctcgtgcctttcaagcactgggattacaggcggctgccactttatgtgatttgaacatctttcacttccagatctatttaatcttttttttttgtttgtttgtttgtttgtttgtttgggggggggttgtttttttttttttttgagtcagggtttctctgtacagtcctggctgtcctggaactcactctgaagaccagtctggccttgaactcagaaatccgcctgcctctgcctcccaagtgctgggattaaaggccaccaccgcccgccccagatagtcttggtgatgtgaatttttttaagttaaagttcttgttacttgtaaattattactttgtttcctttttgaaataatagtgcaatacagaatgcaccaaatcctggaggtggtgacctacagaaagcaggaaagctctctccacttaaagtgcagtctaagaagcttccatgtcgaggccagactacctgccggggatcgtgtgattctggagagctaagccggaactcaggaacattttcttcacagattgagaatacacctgtcttgtgtccttttcatttgcaaccagtgcctgagtatgacattgtttctgttaatagttttagtgccaggttatttttcagttaagaaaatcacatttctcctgattactgttgtattgctttcacaactacatttctaataatgctttctataatgctagatataatcttcctgcctcagccttccaggtattatcacaaaaaatgtgtaccaccattcttgcattctataaagttgctaagttgtgctctcttactcagttattagcttttaaaaaaattttagtaaacagagctggagagatggtttaatagtttttttttgtttgtttcttttttaagatttatttattatatgtaagtacactgtagctgtcttcagacactccagaagagggagtcagatctcgttacggatggttgtgagtcaccatgtggttgctgggatttgaactcaggacctttgaagaatagtcatgtgcatctcaccagccccccgggttaatcgttaagagaacttctt

SEQ ID NO: 34869 - DNA, 2990 bp, Mus musculus
gtgtgttgtggaagagacctgtaagtatgaggggtatattttatgagaacattttgtaaataaagacagaatttgaacttgtgttgaagattcatatgaatagccgttctaaagctgtttgttttgttttgcacctttaaaactggactactgtttgttggtttaagaatagcaagttgaaatagaagaatccagactagaccctaagattgtgggaatgggtacctgatttataaatgaatttttttaaaagtgtttttctttccagaattgaattggacacagttggcattcccagtttgtaaagtaagtcaggtttagccttagtctcagtatgtctgcaaggcatagaacctgccccagatcacagtctctgaccagtccagccagaatgcactccatgtctgaagataaacgactgcaaaatatagctgatcatgtggtatcatgtattagtaaaatatatttcctatggtacagccctgtaatttttttagtaatttgccactcactatgaccttctggcaagcccaaatactggtgtattaattgaactagattttgctcattttacgtgatactgtaactcctgtaacctcaattaggtgtcaccaagctgacattccacactccttttatgaatgctggaacaatttgaatcaaactctagctttcctttagatttataaattatccatccaaagttatagatatgcacccttaagggttttttgggttttagttttacagtcctttaagttgatttcttgctatttgggtctttattttatctgggctacatcactgttaatttcattataatttgtttttttaatcaaaattgaccataaagaaaagatacttggtggtcacggctgtttgcatgtctgtcatgtgtttgcagttgcatctgtatctgttacaccacatcacatgcttagtccatgtttaacatcaatttaaaaggttggaaaagaattttagaaagccctatatctctttttttaaattaagttaaacttagcagcaaaaagttaagtgtagtggtttttaaaaaaattttttttttaaatctgatctgttcttatgcactgcacaaaatgaaaagtacttcttttatgctaaacttaaggactaccaaaccagtgagtgaagaacacttgagaacttcacacatgatcagtcgtacagtcttttgagaatatttttcaaatatgtacttagttggattagagtttgacaaaactagtctctttagttaatgttttctttgctactttgaaaccatactgtgttctggtagataccatgtgtctgtctgtgtaggtgtgttaatctgtggaagcctgaatcaggaatggagaattcacaagttgagtattaaaatactggtacatgctttgaaaaaaatgctaattccagatgtatatatggaaaataatctgtcatattttgaaggcatactccgtctatagtgtgagctacaagtctggacataaatgtctgaaaaatggtaaactcgctatgaatcaaatattattaatcaaacatttccagtacagtaatggtatagaaagtgcattccaggaacaaagtgaaggttctcttaatctctcacccagaaacagtgaactaaactcttgatcagcatggttttaaatgtgggaaggaaattaaacacatgtcccaatgtgtgtatcttgtgattctgcctccagccaaataatgcaaaaatgtggcacctgtttttattgtgttactttctttgttgacagtttttattttctaaaaattaccaatatttggagaaagaaagtgaacacaaaaaaagcaaatcagtattctgaatgtagcacagttaccaacagcagcattttaatctctgaagaacgttgtgctccatgctgttgtgtgccttagttgtgctgctcatacaaatgaaggaaaggaaaggcctccggccactgaactgccattgttagttattcctttaaggttcccaagatggcaggtacctctgttaatacttggatgagaggcacagcatcttttcaccacactgcttggattttcacagggattgtactaaaagctgtaactcagccagaagcagttatttgcttatctggtaacaatgtagtgttccttcctcttctccatggtaagtgacatgatgagaaaaactgacatttttcagagcctttttacctttgagtctagagagaagatgctaaggtactggacaatgatactgtatttgatttggggagtaaaaaacggggaaggaaatgaactttggcttttttccagtgggttattttccctttcaaggtgactgtgctgatttgtttgttttatcaattttatgcataatatgtgactgtaaaaccttatatatctcttaagtaactacaaatcattgttatttaaagccaacaaaatagcataacagttttaagttcaataatgttaagtattgtatagaaatatattggaggtaaagttcagttatgaaattgtgtatatgttattgatgctgtaaattatttttaataaagaaaattgtattatcacatttgactcgttgtgttttatagtcactcagaataaagcataacttaaatgggatccagaaatctctcatcaaatatattctataatgttcagattttgttcattcccaatataacagccaggatggttaatctcaccactatatctctaagttcctttctatgctaagattaatgagaataaaagtctgaaatatggttagtgtccacttaaacagtaaatgaatttaattctgggagtatcacaatggataatcaagttatagagtcagtttagtaggaaagagtaatctgacctaaaccaggatcttctgtacaaacacaagtcaggcaagttaacattaaagtgacagagtatcctacccagtgatccgttctgatgccgaagcttgaatgtttaaacctggatttcaccag

SEQ ID NO: 34870 - DNA, 1210 bp, Mus musculus
tagcgccggcgccaggcgtggaggtagctgtgttcacagtcgaatccgaaacccgccgtggcctcctggctgctgtgctcagggccacctttctgtttctcctacatgttggaaccgactcctggcaggttaactctccttaggcctgacgactcttctaaaatgtcacttcccgtggtccttgaatccagcccgtcggtgaagcggtcttaagtaagataaaggtgttttctaacatctgggcgcgcagacccttcaaatgtctgcttagctttccagccacgatgccttccttatatcccatttggcaacataggaattgaactgccatttttctactaaggcagagtttccattgctgtctttcgaagaaacggaaataaggaccaggtttaccacctaacccctacacccccaaatttaggaccatgtgaattatccactttgttaacctttctcagcctgctctacttggaatgcccttccttcaccccttcacaattctttttctttgacttgaggcttttcaacttacctttgcctctcccacctctaatttactctcattatctgtattggtttcctaaaatcttacttgctgtcgattctgctttccctccccaccctgaatgtctcttccatgttgctttataatctttgtctgtcatacctggctgctagattctgagcttttcaggacaccatggtttacctttattgtggtggcccagcatctgtataggtcccagtggtggtgcagttcatgttagctgagtgatggtgtggatcaagtggtattaacagtggaagacacttcttaaaattgtgggggttttgttattaatgatcctgttttcttttcacaggaatcaacataaagttcagaaaccatggtgagttcatgacacgtttcctttaacttttgcctgggaacattatggcttgtttgaagctcacagcctgacatggaagaaaatgaaaccaaaggggtagagggagttgaatggggtcttccgtcttctttccactgaactcagcaccagggtgtcattgtatccaatgcatggacatccggaagttggcgtatgtcagtgaacaggcatcatctctgtttttcctttgcagtctcgaagatatgactccaggaccacaatattttctccagaaggtaaattagaagatttaacctgctccaaagaaggttggggca

SEQ ID NO: 34871 - DNA, 1137 bp, Mus musculus
ctttgctgtatattggctgggataagcactatggctttcagctctatcagagtgacccaagtggaaactatgggggatggaaagccacatgcattgggaacaacagtgctgtgagtattttcgtgccactgtaaaatgtagtgaaaggctaagaggacagtaatgttaaatagtgatgtgtgtgtgtgtgtgttagagtatctaccataggatttaacagcttcataacttcttcagtgtgaagggaatgcctgtttgtagtgctacatcttgatagtttgttgaagctatctgtagctaagggctagttttcccttataagtagtagaactcttaaagacaagtctcttgaggccagggcctcatttaaaggtcctgtccctgccctgttcatgccgccttcccctgctgtcagcagtgggctatacttcttcagtgtcagcatgaattcaggccttagttcttctaaccatcctgtgccctccccaccatgcgcagattggaaggaaactctgttgatgttttgttttcaggcggctgtgtcaatgttgaaacaagactacaaagaaggcgaaatgactctgaagtcagcgcttgctctggctgttaaggtgctaaataagacaatggatgttagtaaactgtcagctgaaaaaggtaatcctgtgtcctcctgctttgtctaaactgaggattttattgaatagccacagccttaggtttttaatgtgttttagttcattgaagctgccacttaggggacactaaggaccccatgtcttgagtaagatgagtcttgatgaactgaaaagccacagttctgcaatatagggcaggcttaaggacttgagcctgactgtaactcctggtttggagatcctgtgtccgcagctggccttgaactcagtgttagaccaaagctggcctcaaactagcattgcccttcccctgcttgttcctcccagatactgggatcccgggtgtgtaccaccatgcctgatggaagctgctttttaggtcatttttttttaaaaaaagaaatgagaaaagtccataaagaagtgttgctttgtttaggattctgtcttgttcttctggttaacttgtgtgggtaacaactgccagccagatatcaga

SEQ ID NO: 34872 - DNA, 1167 bp, Mus musculus
gatttttacagtaacctttctatattgagcctatggggtatgaagatttgcaaaatcttgtttgtttagagccaataaaagtttaactgatggtcaatactggtttagaaattttaggtcttctaaaccatagctttttcaggtctgaaataattttattgccaaaattatgacaggaagcctcctcattaaattgttacactttttcacggttgtgtgaaagtttgaactaatctaaaagtatgatcgtaattgtaccatattagcgtacagcaaaacgaggcagccacttgtgagcagtaatttccactggagcagcagggtcctagtggaccaaacctgcttcctgttggttcagcatttcttgtgaggaagagccacagtgcagagcctgaagttctaaagtatgaggtcattttacctttccatttattagcggggtgttgcaattgacgataaactaataaacttatggaatggttggcacaaagacagactctttgagcaaaattatgaaagatacctaaattggagatccttaaatttttgctgtagtcatgcagtggcttttacatcagaagaccagtaggagttcagcctgtgttaattcttttttaaaatgtgacacagatcaatgtactttgcatttttattacctttcctgaatcaatcctctttggttggtaatagacttttttggatccatgtttgatttgaatctagctacttaagcacttttaaaagaaacctcgaagcacactcctgcacgacccagtacagagttaaacggcttttcttatatatttgatttgagattttttttttaaactttgcaaaccacatctaggagatgtggcacttgtgcattttatgtgtggtgttagtttctcttgattctgttggttaagagggcagaaaagatatctggtattcttggtcacttggttaccctaaatatatgattgccagtggctcagatgacaagtgacaagacagaattcttcaacacattattaagttccttatgcctaaggcaaaatcttgaatacattattgaattctaatttcctaatggctagcagattgacagctgcacatttggcatgctttggggttgggtttttttttttttttgattttatttttcattgcagatttatttggcaa

SEQ ID NO: 34873 - DNA, 1230 bp, Mus musculus
tgtttgcagccggcttaaacgccaggctgcctccggtcccttccgggcggaactgtgcaggccggtgcaccgccgcagcggcgtgtccagtaccggaagcggcccaccggaagtggcgcgcgcctgctcagggagctcgggttgtaggtggtgcgccggccgctccggtacccctgagactctgtagggccttcgggccggtaggcgaggaatggagccggcaggcggcggtggcggcgtctcctcctccacagatccgcgaagcacctacgtgctgagtaaccttgcggaggtggtggagcgtgtgtttaccttcctgccggccaaagcgctgcttcgggtagccgggtgagggcgaatggggcgggaggagaccttcgtcccggagggtggcggggtcgcctctgccgggacctctgcccgggtttcctagtgcttagctggcgctgcgaggctgctgacggtgggaaccggccgcccggcggcaaccctttgtgcttttgcatccccagagtatgccgcctgtggagggagtgtgtacgcagagtgctgcggacccatcgcagcgtgacctggatctccgcgggtgtggctgaagcgggccacctggagggacattgcttggtgcgcgtggtagctgaggcgcttgaggcaagtatggagttatgcgttggacagtcacttgcaggactggtgggccatcttggagaactttttaaaaaatcaagattgtgatacatatccttgctttcgttaactcggagaacctatgctcgtattctggcttttgtagtaaacgtcaggttttgtaggggcgtactgcggtttagtcattattagatgttgggcaattgaagtatccaggtgtccactattacaaggccgtacagagccttccttaacttgcctcaattttgcaatgaaggtgttgggtatcgcttgcccagggtctcacactagaaccggaagaactaaaacttctacctaaatacgtaaaccacattccttttctcatttttgtccctggatccaggagagtcagtgttcagggaggtgaagacagattatagagctgatagatagtgaatctccagtatctcactgagtggcaggggccctcgtgaggaaattgccaatttgatgccctattatcgcttagtatgtataataggcaaataggaatgttctacttaaccacaatatagtctccacattgggaagttatcattg

SEQ ID NO: 34874 - DNA, 1149 bp, Mus musculus
gttacttatggtataaggctatatattttcaatggatattaaggactcttgtaatatcactatgaaagttcaaatagcttttaaaaaattaaactcatggtgagacagaaacatggcgactaagtcatctatgctgttttctctgtgttttccagaccaattgtggactgagtattttaatagatacaaggaaagttgcttaacttcctattagaaatattttgaactttttaaagacagcttgtcatttgtaactttgaatagtattgtcctagctgccttatgctacagtgaatgtctcattttgaggcttttcgtagtcagttcccagtgagaattagagatgaagcttgtgtttgtttaaatgtaggaagctcaagaaactaaatacctgctttgtgaaagttaccttctgttgatggcagaggcaggaccaggccctgactccttggatcagcaggcattacagacagaaataactcagtgtcagaaagaagcccaagaaggtctagtggctgtaggtattggcaggtctgcatagctgtagctgaaaggcaagcagtctgagtgttgctgttattttatcaaaaggattggaaaagtcctgtggaattttaaattgtggcaactagttagattttctagaaatgacaggtgaaatcaaggtcttaccaccccaccctgcagggtgtactgttcagtgcgtttcatgagtttatcatgaccctctctgaaactgtctgcatctcccctggttaccaggcagtgatgttgtgctgctcttcactccattcctggaggaaacactttcatttagttcagcctttgagacctgtctgccatgtgaggcttaggaaagccagcagtctgaggaggctctgctcagagttgagactacacaagcaggcagggctgtaaaggatgccgcatggaggtacagatacacaaggtgagaggtttgctctgcagtgcctagcagcaagggaacttgtttgtaccagtgtgagcaggtctgaaatactgaactgaggggctggcatggaaggccccatgaggggtgcagccccctctgacaagaatcttcttactgtgacctctgctctaaaagatcagtgagctttgtgaaaatgaactcaagctgataagagt

SEQ ID NO: 34875 - DNA, 1100 bp, Mus musculus
gagttaagtgggattatcctgttcaacactgactggtctcaatgaatgaaaagaaagtaccagaggttcagtggaagctctggggagagatggccactggctctcggagctctgctgcctgccagtgatgcaagctgctttaagaccacatctgagaagataagctcgaggtcactggtgtgcgaggaatgaagatgtggagctggcactgcagttattcacttcaacatgtctgtgtatagcactctgcaaaatgcccttgcttatgtgaggcatattacattcaaatagccataggttttattaatggaaaaatcataactaaggcttgagtgagtaatctcaggctctaagaatcggagaactgagcacttcagcactgcagaacacactgggagtgccagtcaacaggagcaacagttcatgctgtttaaggctgtctctgtccctcacttctctgcaggtcttctggacaaccctgaacttcgtgtggtccttgtctttggctataactgctgtaaggtgggagccagtaattacctgcatcgggtagtcagcactttcagcgatatgaatatcatcttggctggaggccaggtggacaatttgtcttcacttacttgtgagaagtaagcctgagtactttgctcttcccccgtgggtaaatagaaatatttgatttcaggtcctcaatacttttaggtttttaaaaaagaaattagaggaatcaagcagagtatagtgttgttatgcctttaattccagtaactctgagtaggcaaaaacaggtgagtctcttgaattcagggccagccttatctatactgctgacttccaggccagtgatgacctgtctcaaaaaaaatacaaaagaaaaggaattgataatataccaattcattccattttactgttgccaagatgctcactaaacataattctgctggcaggcaaagaactaaacttggatttgttgttttttaagaatgtcagaatcaggctcttttagcattacccgttgatatattttagagctctggtccttgtgttgctcctgcaaatgaagaaatcatttgagtaaggctaaaataaattaatac

SEQ ID NO: 34876 - DNA, 1196 bp, Mus musculus
agaggtggctcagggaaagagcagctcctgcccttacagaagctcccatcttggttctgagcacctacatcaggcgattcctaaccacctgtgactccagctccagagactagtaacctctctggtctctgcgggcacctgcactcatgtgctcagtctacacagacagcatttggatggagcgctcaggagtcctttctcttgtcacctgtgtggccaaggattgaactgaggttgtcagttcttgtgacaagtgctgcatcagccctgttaagacttttttttaatgaatgggacttttatccttacaaaagaaaatgcattaagttataaaacttatactgactactcactgggaagaaacatacaccttaagtccctatgacatttatcaacaactgactctatagaatgggcaaagttctctggggtaacaagaaacaaagctatcaagcatcactggggcatatacatacacgcaaaataaaatctggtatacatttcccaaaaacgaagaccaaggaatactagtaatatacccataagctgctgctctctgggggaaaaaggttagagatgccacagagagatcctgcctccaatgcaagtggttagagcctgacaagtttttccatgaagacctggcccatgtaacaactttatagtctaaccaggataatttgtgaaccacagagatgtctttaagaggctgaagtttgctttagacataagaactcaatcttcaagtaattgcttagaaagatgagcttgcagggtccaactgtgggacttctgctcatttgctgcccacctccttgcaatcgtccctcctgtgtgtactcagcatatgcagagatctcagcaccaggctagtctcagctcatttaagatgacttccacacaagggccatggaacactgtttacaacaaggtgcctcaacctcaccttagaattcccctttcccttaaaaactcagtcttccttatttgtttctatgaaacctctactgcccagttacactcaattctactgaagtaaaagccatgtgtattaatttattttagccttactcaaatgatttcttcatttgcaggagcaacacaaggaccagagctctaaaatatatcaacgggtaatgctaaaagagcctgattctgacattcttaaaaaacaacaaatccaagtttagttcttt

SEQ ID NO: 34877 - DNA, 1189 bp, Mus musculus
gtgttgatggttttctgtttctatttccaggaaccctctggatattgatgccacaggtgtggttggactgtcatttagtgggcaccgaatccagagtgccacagttctcctcactgaggatgtaaatgatgccaagaccgtcgaggctgctatgcagcgcctcaaagcagccaacatccctgaacagaacaccattggcttcatgtttgcatgcgttggccgaggctttcagtactacagagccaaggggaatgttgaagctgatgcatttagaaagttctttcccagtgtccccttatttggcttctttggaaatggggagattggctgcgaccggatagtcactgggaactttatactgaggagatgtaatgaggtaaaggaagaggacctgttccatagctacacaaccatcatggctctcgttcacctgggaacctctaaatgagccgcctcgctgagagcacctttcacaccatgtaactttgggggtttctcttttttaggaaaatggaaactcgggatccaaatattttaagcaaaactagctatgtgtgttttgtagctttgggtgacgctctgaggtcactttgggatgatttttttaatacatagatgaaggacagcattaacattgtaagcacacaagtcaagaagtgaggctgtggttaggcgcaagcaaagctgccggggctgaactgccccagattctgtagccactgcataagcgccctgcgaggttgagggccaccaggaaggtggaggtttaaatagtgcttgatgaacttttagcagaatcatgacttaagaaaggagaaaattgccaggcgtggtgatgcgcacctttaatcccagcactcgggaggcagaggcaggcagatttctgagttggaggccagcctggtctatagagtgagttccaggacagccagggctacagagaaaccctgtctcgaaacccccacacaccccccctaaaaaaaagaagaaaggagaattaaagaactggtttgagaagttttgcagaagctgtaacaaatattactgactttttacttttctgatgaacagtctgttttgttactgtataaagtcgttctttttgtgagttagctttttcctcttcatagtaaagagactgcaagggaacagcctttatcacacagttctgaaaatcatcaccatattt

SEQ ID NO: 34878 - DNA, 1191 bp, Mus musculus
aacatataactgctatgtgcctgtatcagccagaccatgtgtgtgtgtttctgagattcaatttatgtgtgacacaggctgctgtgcttgatctgtttatacaacatgaacttgacaaaggttgcaccatgtattgaaattttttcttttatattttctagtaaatatatatagtaaaagcttttccagtgttttactcttctagttttttctctttctcttgtttaaattcagggatccataactgtcacatattgtacttgatatttattagggcagtagatctcataatttatcaaattgaatcagcttcttattactataaatcttctataactcctaatatacagaaatggtaggtactaaatttcaaagactatctcaaaagctagatatcccttatcccgagatacatgtgaagtgtaaaatgtttgaattaaaatttatgcagaagctaacccccttttaaaggggtttagaagataccgctgttgatcattatatcagtcaacttgcgtttgtgtaactcactgctttttttttttttttttaagaaccttctgcccagagtagctgccaaacttaatgttgctccagtttctgacatcattgagatcaagtcacctgacacatttgtgagaactatctatgcaggtaagttctaaggaagataatcaacatgttaatttttacagtatacataaatcttagaaataggattaggaaacaaacctacgattaaatggaccatcttaaaggtttctgaaaaatgctttaattgagaatagctactgtccaatttattatgtgcacagtgcttttatactgccttacagtttatggagtgagatctttccctccagtggctaataaaaattaagtttgccatccaatatatatgtattttaaatgtttaattgtgatgtaattatatcactcctccctccaacctttcctgtcatttccttttctgtcagttgatggcccatttttctttattactgttacatacacatatgcataactgtataaatacaactactctgtttagtttgcttgtgtgtatatgatttcagagctggctagttctgtttggatagccagttgtattggataaccaattaaagggctcatgcctgagagagactagttctctctcagcagtcattgctgtcctgtgcttctttgtct

SEQ ID NO: 34879 - DNA, 1265 bp, Mus musculus
atgcatgtgtaatcgttttaaaacgtggaatttactgagctcctggtatacctatgtggttttggcaaatcacactaacctgagcattttccttacaaagactgattctggacactttatggtttattttcttttaaaggctcttcatctgattgatgagatggatttgaatagtgacaaaaagctctctgaagaagagattctggaaaaccaagacttgttccttaccagcgaagccacggattatggccgacagctccatgacgactacttctatcatgacgagctttaacccccgagtgcgccccagcaggatgcggccttctgtagtttgctaccagcttgacttttatgatgagatatagatgttgtcctttacactcttaagtcttaccacttcagatgatctaaatgtagattataacttttggccttttcaaagaaaacaaaacaagaacttgtcatttatttcaagacatattgaaggagtaaactattaatgttgtgccatatgaccacacagtctttcctaagtactccatctatgtagtgctgtgttgtggaatgttgagctctgttgccatacttgaagacatggaggatttagacatgtctaaacaatagtatttaagtagcacgtgatgaagctgtcagttttcgttcttgtactagtagacttacttttgaaactgacaaaggacagtgtttagatttagtgttttatcttaaagcctttaaaggaaccttcacaaggacttaaacctcacatagatgttgagaagttctacttaattttaaaatggtttctaaaaagggttttgtcgtatgaaatagaactttatatttttgcatatgtatagatagtaattatatttaatgtataactatagcattatggtgtgtggaaattgacattgtccagaactcttcacttttgattgattaaaaataaactgtcctatctttttatatgtttgggtttttgttttttttgttttatttttccagataaatcttaaattcagcatgggttttgttatattaaacattattcattcctttattagatagtgaatgttctcaagattgttaattattcttggtacatagtcttatttacctttttttaaaaaaattaaaagaattatgttataattgaacgtgcacctgagacattttcaattgcttttatgctgagtgtgattttgcactttggtgctaacataatgtttttgttttgtttgagatgctaggaatcatccccg

SEQ ID NO: 34880 - DNA, 1154 bp, Mus musculus
cttatcagaactactatgacagggaggtgaccccactgattggcagccctagcgtccagccctcctgtggtgtgataaagaggtgagcacccgatgaactgcatatgatcaggacacagccgcggggtcagcctgacttccacatctcatggctgaacagctcctgtgggtctggtaccctgttcagaagctggccatcccattgagatagtccaggatcaaactaccgtcagagcgccccgggtccaagagcatccaagtactaattactcacactccagttattcaccaacggctatgcggagagtcccgggcaagtgcccactctggcttccttgtctgtctggccctactgagaggcagggtagtgtcttaactgagaggtagcacgggtgacttccaggtggcttatgaatggcccaaagcccagacatttggattcaccaggcttttagagggccatctccctggcctggctgtagtcaggtgccaaggccctagttctgtgtcctgtgggtgacctggcctagtcattgcgcagccaaggaaaagacgacttgcttggcccacactggctgggcctggcaagatatgtgggagctgaactttaaaggtagcttcctcctccccacagagcctggggctggggatctggtggggatggggccctgctggctgcaggtgcggagatgaccaggagagtgaccatgggaggagaggatgctgagaacgaagggactatcaggaatggctgtggggaggcctgctgccatggaggcctgtggtggtagcaggttggcagaggtcctgaagcgctgagaattcccaattatcccctttgcttccagtgaggtaaggcaaggcctacccctcttctctcctccctaccaccaggttctctgggctgctacatggaagtcccaagaccacaccttctgctcctgctggtaaataagggggaagggctaatgggagaggggacatgtctcccaccagtggggatgagaggactcctgtatagcattgatggaacactaatgtcccagagggaaaaggtattctgtccaagagtgtggatggtgtaggattaagccccaccccagcagtctcagattcgggcctcatcctgctctcagcttccacagagactctga

SEQ ID NO: 34881 - DNA, 1608 bp, Mus musculus
ggtttggggagtgctactgcacactgttagtggggattctccgtaagcacgcctgccttgcctcgcgcctgcctcacctcgcgcctgcctcgcctcacacccgcttcagagttcctgggtataaagcaggagctacttctggtaaatagtatgtgttcataagaagcttcctttttcattgttactgcgttttgataatttgaggttattaaagcttgaactaatgtcattgccaagaaagaaatacacacttgccaggggccgtcagccttgattcacactgttttcttcctgcagctgctgggcatgctgtgcgcatgcatcgtgttgtgcagacggagtagagatcctgcctatgagctcctcatcactggcggaacctacgcgtagcggacagcacgtgcctgagctaatttgtagtatccttgttctgattcagaaggtgaattgagcaggcctgcagcagttggctcctgagttcatctagtcaaagcacacgtacactggtgttgactagcaggttggcatttcatgtacccaccttcctacctgcccctctggctttcttacccttgttctagatgattctccatgcccttaatttcagaaccatttacaagttctgtaatgtggtagagctataggagggtgtggcctgcttctgtcacctctgaggagtaatggactgtgttgtggtatcactgggcccttttcgtcttcataacgagaactcttggccaaaggtttgagggtaaagagggaggacgccagctgtctggtgccgcacaccagtgtccttttaaagaatatatactgtagtacaataatatagcaattgtacaaaatggctaacatagattttagaatcaaacagtatgtgtctttgttcatcttcaaaatcagagactgatctttgaaattagtggtttttaatcaaagctggctttataggaagactataatgtatgcactactgttttaaagcagttggtgtgagtgtgtgcgtttctctgtgtgattgaacccattcatcataagtcttacactcgttagagataatgtacccatggagactagcaaaatagtatgtagatgtgatctcaattgtaaatagaaaaatttaattcaataaactctgtatcagccctaccatgtacattttaattatttggggatatttcagttccacagcagcagtatacagcaggataatgtttcaaatgctgctgttgactgcagttctcatgatttgcatgggcttctattatatgctgccagattctaaaggctgtggtattctgcaaaccacaggtgctttctggagtatttagaacatctgcagagtacaaaggcctaggggatagacagtgatggcgctgtccttgacctaaggactctgaactcctaacacaagagacgcatacaagagcaggaatttttattagtgcagtagtggtagtgtaaaagaacagggcccaaaggagacacccagagagatcagggacgtggcattgcgtagaaggtttagtgacatcacttatgagctcctggaggaaatgcccaagcatagaagctagaaggctctgcaggggtcttgggggatggtat

SEQ ID NO: 34882 - DNA, 1203 bp, Mus musculus
tctctgtatgcaagtatctgagcacagagctggggcctcatgctaacgaaaccaaaagtgataaagaatgtgtgtaggccccctggagaaggaaggggcctggagctgcaataatgctttctgcacccgtgactcccaagtgtccaaagagtttttaataatgaatcaggaatgttctagctttactgacttaagagtgatgggagttaataacctcctgggttgaagacaagttcagctgctagaatgtgtgtataatatgagcaaagctctgggatagagcccagcacatcacctcagctgaggtggttggcagtgcccactgcaattctactcttgaaagtagaggcaggaagaacagaaatccaaggctggctaggatacacaagacacagtctcagaaaaaaaaatgctaacctgagcaagagtaggaacttcggggttgggactcaaaccagtgtttcacctgctcttacagggggcagctggcatcctctgctacgtgggagcctatgtcttcatcacctatgacgactatgaccacttcttcgaggatgtgtacacgctcttccctgccgtggtgatcatagctgtaggagccttgcttttcatcattggcctgatcggctgctgtgctacaatccgggagagccgctgtggacttgccacggtaagttaacactcactctccaatgtcagactatggagggctgtttatctggacctctatcttgaatggagagcaagttctgtagatgtagatgtcttggctcttctaactataccagagtattaacacatgccttaaacctctagaggttgccccatagttttttatgaagggaatatttagaactttttaaaaattttacttaatttctgatgtttatttacagtttgtcttcatcctgctcttggttttcgtcacagaagtggttgttgtggttttgggatacgtgtacagagcaaaggtatgttgtccactgcgcctcacccagagccttgaaagctggcttaagctttgcaggtagagcaggttcacttgatcaaagtcagcattgccattgtcttactgctgctctaatatacctacgattaactggcaatgacttatacaacttttctcaattagctggggacagatttttctttttcctgtagacatttgatagatgcatgtgggacattgcccagtgcgtagat

SEQ ID NO: 34883 - DNA, 1142 bp, Mus musculus
tccccatgcacaatcttgaagcccactcagtagtgggtcatgcaagctttccaagtttgatttatccagtattgggaaatcagcaaatattagctggtaacctacagtgaggatttcccaaagcctttacctagagtgatctgaaaagatgcaggctagtctcagaaactgggatggatttaggaagcttcattatattctaagtaattctaggcttataaagcatccacacagtgggaaacaggacagaactcggctctctgggccagctctggcatgcttgttatttctctcactagtggataaggattgggattctggtccagcctcgtaactaaacagaatggctgcccataaaactgggttattagatttacctcattgaagctcattttctgagagacccaaagtgctgcgctgagacaaacccaagtgcaccgaagtccatccgctcatgctcacagcggtgcacaggtggggacgccatggaccaaagccaatgccccaagggaagtcagaagagccataatgcaggaccctagacaggttataccaaagaaaacaagccttcctcatcctgctgcttctcagatgacggggtgagctgtgacagatgccagaggaagggtttgcaaacattccatggtcaaggtgttcaacgggtaagtccatccccaaaccagtaaaataaaataaaaagaagggttctctgttagttagtttcacgcaggccgtttgtacgtcagaagaaaaggtgtagggagcggcagcagccagagcagatggcaaaaaaaaaaaaattctctgctatcttaagaaggagcttttaaccggcgcactctcaccacacctggctagtgccagaccttatgcacgggagcaccgcatctgtaatatcaaagcttgggtttatggtgatttttttttttcctaaaaagaggtgctgtcaagagatttgtttaaagaactcttgggaaattttcttaacccactgtaccattttatgaacctccccacaaaaatgactctcactcagcatccccatcatctaacatgtaagtacccagactgtctaaggtgctatacagctgttacacacctacccctgcagctgttttaaattagagacttctgcatcagct

SEQ ID NO: 34884 - DNA, 1312 bp, Mus musculus
tatctccaccttcctcatgttaccctcatgtccctgtcctggtatccactcagaatttaaggaaaggaaagaagccaactgccacccttgtccagggacatgggctccattcagcaaggtcacctacagctttctacagtgaatggctgagtgtttctttactgtacagcagttcagctgcacaaacatgcagtcaccttcccttggagcatttgtcatcccaatagtctcacaaatgtggggtaaaaagtgaaaaatgcacagccatgaaggagcagctcccatggaatgatctcaccaagctgcatacacctcttccataactctgaagctcgcctgcattaactagctagcagtacacacatcaccaacctcagctgtcacccactaatgctctcacagcagattcctctcccttgaagtgaccacctctttccctagaggacatcccattatccttcttggctccgttgtagtcactggggactagcctttgctctggcatacagtgaaaggaggggaccctacatagagagccacccggcagccgcaaccctgctgccactgcttcactgtccttcaccttcaccctgtcccgcctgctgaagtttgggtttatcattcacttcttgtggtggcccattacaaagctgaccaaaggtggtatcaccgatgcctcagcaggatgaaatatagtccagagattatgaatagttggcaggatatgaagaaataatgtccttatgtgtgcaattctccaggggccctcagggaacagactttcaagtactgttctttgattcctgtcagacctacccgcatggcagccaggcctggtggtgtctgtctgagtcagagtttcttcccccacaagcagtaattggccagcttccttccgtcagtaagccggtattaactagtctgccaaatgctgtcggcaacagccctgagtgagatggttatccgtttagcgtcaccatcaccttagaaagctacccgaagctggctattggaatggccggaagacaaggggaatgggaaaggtcacgaagatggctgacctgttcctcggagtgcgagcctcttccagaaagactgcctcccagagtgagtggcacgttgctcctaagactctgcagtgggtctggagctcggctcacaggaaggctgatggctgcagtgggtgactgagagttgttccccgtggagcccgggctctcccgtgaattatgtgcaatttttgtatgtatttttaagctgtatattacagtgtttatgttgcaactttccatgagtgagaactgcagaagcc

SEQ ID NO: 34885 - DNA, 1530 bp, Mus musculus
ttgaaaggaaaaggatctacctactccacattcactgcagtggtaagctattgaaatagttactttgtgtcaggtttttcaggctgccataacagaatattatagattaattaggtggcttaaataggttgtgtgtgtgtgtgtgtgtgtgtgtgtgtgtgtgtgtgtgttgctgggaattgaacttagggtcttgtgtgtgctggacaagcacctgactgccaattgaaaccactggtccaacaatagaaattgattttcttatgtttctagaagctgagaagtccaaagtcagagttgtaagttggttattttttggtaaggactagtctctctgagtcctcacatgtgatgagtgtcactaagagggctatcttttcttagaaagacactggtcctattgtattcaggtcccaaactatatgacttacttaagtatctctctctttgtgagctgtatcttcagatatgccctcattgcacttcagagtttcagcgtctaaatgaggagacacaattcagtccataggattctaccttcagtccctccctctcatgtctctatcacaggcatttggtgtatgtgcttggctgaggagccaatggggcgaagctaccatctgtgggattatgactgaacgcctctaagtcagaatcccgcccaggcggaacgatacggcagcgccgaaggagcctcggttggccccggatagccgggtccccgtccgtccccgctcggcggggtccccgcgtcgtccccgtcgggaccggggtccggtgcggagagccgttcgtcttgggaaacggggtgcggccggaaagggggccgccctctcgcccgtcacgttgaacgcacgttcgtgtggaacctggcgctaaaccattcgtagacgacctgcttctgggtcggggtttcgtacatagcagagcagctccctcgctgcgatctattgaaagtctgattatttccttttccccagtgtacagttacccttgtaaaaggccgtaggtccctctggggaagaactggagaaagggtaacagcccaactgccttaaaagtcttattcccaaggatcaactctaaagcccttatttaaagcctcatctacatgttctctaaatgagatatgaatgaaacttaaggtatgattcaacttactgcagcgttgctatctgatatctgggtaaagctagacaacttatttgctttccaaatacagttgtgcagattccatcctgaaatatgagaaatcagaggcaagagagaaaggagagctgggtaccaaagtccaaatctagcaagtctcagatacccacccgtaactcataaagatgctctcatttgatgctctcatttgatactctgttgctcatatagtgcctcaaaaagactctctaccctgaggcacaatttattttccccttaactctctaaatctagagaaacaggctaatcatttgttgacacctaaaaggaaacagccctatccactggtcccttattaagaagaacaatattgattttttt

SEQ ID NO: 34886 - DNA, 1170 bp, Mus musculus
taagtaaccagaactctgagcatccctgcagcctgttttgaggagtcatatatacctttctgaaagagatttcctctgtgagcaccgtcctcctgctcatttagtcttgttctaggcctccagatactcagccttttttcctatctaagaccttcatatatattgtttacttagaattgaaagtacaggattactttttaatgaaaaccatctttaaaagggtcattttatttttgaaaggcctttttagagtacagaaatgttaactatatacaaaagtaaatacacacagacaggcaggcaggcaggcaggcgggcagattcagatatttaccactgaagggactctagccagttcacaagcatggctctgacaggttttgcctttctcccttgctaaaaagcattagattacattccgacagctagccaccaagatctgttcctcttcctcctcctgaagctgactaccaagctatcaaggtattgatgtccagcaatgaaaggcccctttggctcacgtaattaacctgcccaattaaaattaaacacctcattctaacacaaggttttcccttgtacctttatatttttgagcctagcctgtaacacctgagccatctctctagcccctcttatacctaagctgccatttgcctctgggccacatctgtcccctctctatccagaggcagtcctgtgtcccactccaggacaaacaccctgacccctcccccttgttcacttccccttcttccttaacctttgtctcctgtcagtctcttccctgttctttgtatctctgtgctgagaacttgatctttgaggtcctgagctgatatggttccctacaaccacaaagccacgctttccattttctaggtatagtatagtttatattcctagcactcaggaaggctgagtcaagaggataatagaatcatgagcctaagctagcctgggctatatagtgagacagagggggtggggaggaaggaaggaaggaaggaaggaaggaaggaaggaaggaaggaaggagagagagagagagagagagagagagagagagagagagaggaaggaaggaaggaaggaaggaaggacggacggacggacagacggacggacgtgggcattagatagatggctcaatggttcagaaaactgaca

SEQ ID NO: 34887 - DNA, 1220 bp, Mus musculus
agatcggacctatcagagtctagtaaagatactatcaaccttttcttatacttggatgtcagacccctgcactacgcattttgcctgaaaattgacagatacctgaaactggagccacagagacaccaaaatactcattattttcacaagaatcttgaagtctgttaggtatttaaaaatctgaaaatttttatatcaaattaaaaaacaatgctgtatgatttttgctgttcacaggacagcattcaatttcatatgtcaaaacacataaagttacttgcctagatttgtcataatttttttaatgctgctatgtcttagaaagcatcattttgatcagttgttattcaccttagagacttctgtttattcatttaaatgcgtaaaatccactaaaaatcccaaatttgtacagtagttttaattgtcaaatcctgggaatgagtatatatggtaatgtcataaatcatgtcataaatcacaaattcctctcataattcgtccttgatccagccatgttttatgaagtaaatgcagccgccgtcaacgttaccactgtacggtgtccctggaattagtaatgatttagtctccggctctctggaaattctgtctcgctggatggcatccatttttaatgctctaccgcataaattttctcaatgtactatgtaataatacttcattaaacatgagattttggacagaatttcattgtcttttatattaatccctctcttacttctaaagcaccattggtgatgacaccagtgaacaaagacattttttttttttaatactgcttcacacttgttaaatgtctttgtttggttttccagtctcttcagttccccctggccagtctatggagacaaactgaagttagaaacatgcctttttcttaagaccatatagttaagtcatgatcttcatgtataatcttaataaactcagcagtaagagatcttagttattttgctataacaatgctttccgtgtaaatttaaaaagacagtttattgagaagactgattttcagttttactcctttgtacttatgatgcagtccttggtgcacactaaatctgacagcatgttttgtatacagtgtctttcaaattgcagtctttgaaaacttgaacaaattccttacaaatgaaacagagggctttatttatttggtagtcttctatcttcttttcattgaacatctgttcttc

SEQ ID NO: 34888 - DNA, 1231 bp, Mus musculus
ttgcacctaaaagtaaaacttttcatgaaggcagggacttcctgttactattatattcctggcatcttacacatgatctggtataaattatacgttagaaaacatatggtagctaccgaggagcagacgtaacgttgtgagcgtttcgtagcggacgtcggaattagtgggagcggagtggggcctcgggggcctcgctagggccacagcggccggcagttgggccccccgccccggccggcggtccgaggagtgcaggaagggggccggggggacccgcccccggccggctgaagtcatgaactccaatgtggagaatctgccgccccacatcatccgcctagtgtacaaggaggtgacaacactgacggcagacccacctgatggcattaaagtcttccccaatgaggaggatctcacagacctgcaggttaccatcgagggccctgaagggactccctatgctggaggtctgttccgtatgaagctcctactggggaaggacttccctgcctccccacccaagggctacttcctgactaaaatcttccacccaaatgtgggccccaatggcgagatctgtgtcaatgtgctcaagagggactggacggctgaattgagcatacgacatgtgctgctgaccatcaagtgcctgctgatccaccctaacccagagtctgcactcaatgaggaggcaggccgcctgcttttggagaattatgaagagtatgctgcccgggcccgtctgctcacagaaatccatgggggtgcatgcagcaccagcagcgggagggctgaggctacccaagacctggccagtggggcttcagcctcctctgctgaccctatgatcccaggggtcctagggggagctgagggtcccatggccaagaaacatgcaggtgagcgagataagaagctggcagccaagaaaaagttggacaagaagcgagcactgaggcgactgtagtggggctctttctccttccctcccttctgtcccctcccactctgtctctaagttatttaaattatggctggggtgggggagggagttggggggggcaccagaacctggatttggttttctaaataaaaagttggaaaagcaaaaaaaaaaaaaaaaaaaaaaaaaagaaaacatatggtaaacaagaaaatgtatcatggcacattaaactgcactttgaggagcaatagtgatgccccatgccctgatcataaagagatt

SEQ ID NO: 34889 - DNA, 1101 bp, Mus musculus
ctcactggagaatctttgaaaaacctaggccgttaccagtctccttggtttttaaccaaaagtattttgtccttgaaaaaaaagtctgaaactgttctattaccacagatcttacagtttccaatgcaaacataaccaagccccccactcccagctgtcaaatggaacaattaggaagactgtgattaatactagcttggtctcattatacaaatatgtatagacagacagctaggcctgatgtccccagcactcgtggtgcaattaattactctgacaccagcttggcaaaggcttcattctactgtcaggagccagtgactaaagtgagccttatagaccacaagtttacaagttttaaaggagcatatcagagctggaaaaggcctttagaaatgtgtgtgtgtgtatctgtgtgtgtgtgtgtgtgtgtgtgtgtgtgtgtgtgtgtgtgtgtgtcccaaagaggtaagatgtagcatttgaagatgccagtgctaaacatgattgtgtaaactgtcatttaagggcctccaaagcacagccctaacatgacagggtggtagtagagctaaggtactcaaacaacaaggcattaaggtaaatacagtgattatgatcttggtgacttttgttttgttttgtttttttgtttttcgagacagggtttctctgtatagccctggctgtcctggaactcactttgtagaccaggctggcctcgaactcagaaatctgcctgcctctgcctcccaagtgctgggattaaaggcatgtgccaccacacccagctgatcttggtgacttttgtccagccatttttaatttttttcatagatatacaatggaagaattaccctccctttcttgtggctaactagcatctagagacacagacagaactcggagggtgtttatgctgagatgtgatcactgtgactgtcatagtccgtgtattgcccagtttctagtgaatcacagagtttggctatttgaagattagagattattatttttgtgtatctttattacattttattcattgtatctgtctgtctttatctatgcacgtggacatggacatggcacaatgtgggtatg

SEQ ID NO: 34890 - DNA, 1326 bp, Mus musculus
gatgatgggaacttctgtggaagaagtctcttgagctcacaaaaaggcatggtggactctgcttatgttttgctttcctctgtagccaccaactgccgaatctatgaaatctgtggaaaagacagcttccttctctccctctccttactaaggaattttgttgttgttgttgttgttgtttaaccacaaaaacaaacaggttctgtttctctcctcagggttggttctcggtttttgggttggatttggggttttgggttagttttagggtttggtttggttgtaggttttgggttggatttgtttttttatttttcttttatgctctagagcacaaggatagaggtggcagctgagatctttggaaccaaagcagagcatgctgagcccattatctaggcactaggccaccaaaggcagggggatggagtatggtccctcacaatctgcccataagccagagcccccatgctgtggctgcaccacacttctccacactgcgttctctcctgtgtgctctattagatagtccaaagggagcagcagtagtaacgagctatgtgagcacattgaactccatgcactgaaaagacccagtcatcactcactgctgcacagccagccagctttgcagcctgtgtgctgccccggctccccaccctcgtctgctgttttttgcttcttagattgcttgcctgctaagcccatgctagaactcactgtctgtggcagaaggacacccaagccggttctgggagtttgtctgtcttcaaccagatgcttcctgccctttcttccttcctcctcttattgctgtttctctctgtatgcagttccgagccgtttccatagcactgatcttcacggccagataaagctatggcttggtccaaagatgatcgatcattctcctctttacagatgtgatacctcatctcgtctagacacattcgcatagccagaattcagtaggatagcaagggaatctccacgatggagttcttgtcacagcagtagcttcctttcaaatactgcctctctctcccagcagctgccataagtggctgggcttcagtcaggttgtatagagctggtctgttccaccttctctcactccatgctcaacacagaagagaggatgtcagggtgcaagctggcacaagggtttatttccctggaaggttcatccatcgctgatcctgcgcctgcaagctctcctcaagaaggaagcagttaccaactcagtgttacacattccattcttgctttttttcttaaaacacaggagcagctggggaagggagatgagggcctttatttctgaca

SEQ ID NO: 34891 - DNA, 1139 bp, Mus musculus
gggcaggcattgagggcactcctgcctggctggacctggcttgggaggagacccaggcctgacgaattgttcaggctctggctactcacctgggccaagctggcaccacggtgtccttccttcctgtcttgatctccaggatcttcagtcattgagagacatccttagggccatctgaattgggacacagtttaaggctggagggctgtgtgactagtgggttgtttcttgtctggtccttttgcgatagtcctgggatagagccaaggtcctgcttggcacctaattctctgcctccttctagaggagaagctgcagcctgggaggcaggaagaacccaccttctagacctcaccctcccacttgccgcatggctgaaagttgcactcacatccttggcttgctagaacacaaactctgggaggggctctgagcctttggcattttctgccctcattgcattcatcatcttggggccacatccttccatccatcagatcttaaaggtctctcagaggctctggggatcaggcctgtgctggatggtcccacatggaaacaccagacggctccctgggaaacgcaggtggaggctgctgggagggagctgggttttctaggtacttcccctcctgtactctcctccgtgatctttgccttttgtggactactatttgaaggaggattaccacggtgctccctgagtcacacacccgtgaaatcacgcctatgatgtgcctgtcatgttttgcgctaacacagagaaaaataaatgcaagccaatgaaagtcaaaatgtttgcatcccgcttaaatccccccatgcaatccagagacagacatgtatctccactctgagagacacagatctgggacccctgagtaataactcagaaaaggattcaggactttgagagggtaaagaaactgagggaaagagagagagagagagagagagagagagagagagagagagagagagagagagagagagagagagagaactttgctcagggccacaggatcacagagcaggagagctgggagtacctgctttgtttctggccttctggtagtgtcatgtgagagaccccaggctggatcccttagcatctttcctgcttctgtctggggaaccct

SEQ ID NO: 34892 - DNA, 1147 bp, Mus musculus
caaaaccatctctggtgggagtggggtgcagtggccccatctgtccacccttcagctctgtccttccctatgtctacctaggtctgagataactgcagctctgtctgtctttgcacctccatttctcggatgctctgccctgcccctcttctgtctctcctgggaaccgcccagctattttctcattaggcagcagtgactaggaccgccttggtgggatggggacagggaggcagctgtcatgctcccctctccttctttctgccagtctagcttcaagtcatgtggactgacaaataggctttatccctgttttctgaaaaagtgttctttccggagggcaagctctgagccagccctagtcttgcctccaccaggaagccctcaggacctctttcctcttttccaaagtcttgggctaggtcccacccttctctcccggatgctctctcctgctcttgctgtctgagggcttcttctggaccggttgttacgtctcaggccttgctttccacccgtgtaacacaggcccatggaggcaatgcttgctactgttagacagagtccatgcaggatacgatggagctgacaggccggccagctaggaatcatggggagaggaccttgttatacacaaggagctctcagagcacgtgcctagctcctgtcactcctgacaagatcaagttcctacagaggccattccattcctcacccacctgggcaccttgaacttgccgggcggtgttgtattgggtctggagagaacagagtctaactggctgtctacggacagaactcaagtccctacttctttctcagctgcatgcaaattctccccacccttccacctctaaatagtcactgtactcagggtatgaaaggggacactttgcaaagcctagcttaccataactataacaaaatacctgaaaccgccatcttatagagcagtggttctcagccttccttatgctgtgactctttaatacagctcctcatgttgtgctgaccctcaaccatacaattatttcattgctacttcataactcttattttgctactgttatgaatcataatgtaaatatctgacatgcaggatatctgatatgcgacccctgtgaaaaggtcgtttgaccacaaagga

SEQ ID NO: 34893 - DNA, 1322 bp, Mus musculus
aactgcgtgtgctgcggcggtaccggctgcagcggcgcgaggagtacacgcgctacaaccagctgagccgagcggtgcgcgagctggcgcggcgcctgcgcgacctgccggaacgcgacccattccgcgtgcgcgcctcggcggcgctgttggacaagctgtacgctatgggcctggtgcccacgcgcggctcactggaactctgcgactccgtctcggcctcgtccttctgccgccgccgcttgcctactttgctcctcaagctacgcatggcgcagcatctccaagctgctgtggcttttgtggagcagggtcatgtccgcgtgggcccagacgtggtcactgatcccgcctttctcgtcactcgcagcatggaggactttgtcacctgggtggactcatccaagatcaagcggcacgtgttggagtacaatgaggagcgcgatgactttgatctagatgcctagcgagtcttcttgtcctggcttctcagctacaggtcactgaaccggggatggggaggattgccccggtgtactgggaatttttcctagaatttggactgacaattaagtgactgtgtcttgagagacagtgggaagcagttttgtaccgcactggggattgctagcttcttgtgccttaaactttgtggtgtagaagcaggaatgttacctcttcccctttgctttcatcttgaaataggaccgtctggatggagagtttgagttcagtatatttatatcgtttaaagaaaccctttcctaatgccaataaatgtcccaccgacgttgtttaagtgcacatttttgtctggtcgttcttcttacctagggtcctacatagccatatctattatcttgctagctgaagagcctaagggcaggaaaagggttgaaggcgtgaggctttggagcctcacgtggaggttgcaggatgttgtacaagctgggcagatttgtcacttaaccagtccttttctcggaatgaatgttttggcagagcttttatccacaagacttcctgttgatattccagccccaggaaataccatattaaagtcctggagtgtttgcttgcctaaggaaatgatcgccctgtagtttggccagctagtggttagaagggacccaggaggttcctgaaaacagatgttcttcaaggtcctggcttcagagttaaggacacccccccccccaaaaaaaaaaaacaagcaaaagggcgaggtagtgctggcacagcctttaatcccagcagttaggaggttaaggcaggcagatctttgagttccaggccagcctggtcgacatgaggacaaccag

SEQ ID NO: 34894 - DNA, 1228 bp, Mus musculus
aggctaacctgggctataatgtaagacactgtttcaaaaaaaaaaaagtaaaactcaaaataaacctgtaaggatgacttccttaaatcacccactctggagacagattcatgtataaagtcaaatcatgtatcaactaaattcaacaataagcaaaatttgatattgttgaaataaatatttcctagtatctttaactgaggcactggttttattggccatacatgatagtatgcctcccagtcatatttctttgggaatgatggaaccacttgccacttacttatggttttgtaagtggttgaatttgccatagactttaagaacaagtactataaatttagtcttatgagtttgattaaaaggagagagccttgtgatattgatgtgagtgattggcctgcactgtgacctgatgccatggtaaagtctgagtctgtgctgctaccgaggttcgaagatcaaggatcctgtccatggtcctgctgcagccatggtctatgctgatgactggcccatgttaacatctgaagccatacagtctgtgctgccacctgaggtctcgttaatgtccttggcctgtgctgctgccaagggctgtgatagtatccatggtctgtgcaggggcagaggacgggctgatgtctatgatctgtactgccacaggagaccaagctgaggtcagtggcacctgctgacactgagaccacgtggatggccatggtccatgctcctgatgactgtaaagggtcaggaagctacttctgccatgtgttgatgactatagactcagagtcgagaaagaaggaaatggtggaaggcttctgtgacaacccctaccccctccccaaaagttacagcctagccagaaagttatcaagagaacttttaaaaattgtgataaggatgctgaagtgtatgtagctctctactcctggagggtgttgcaggtggggaaggactcagttttctttaaggagtgggccactgggagatggaccatgctccagtgagtatatgggcaacacaaattggactttttgtgtatgtgtgtggggtgggggtcccaacggtggggagcagagttgggaggactaggaagtaagagtgctcggggttcatggtgtgaaattcctaaaccaataaaaagatgagagcgcgagtaatcaagtgaacctatggtggaatgcatacctgtcatcctaacatttggaaagaagagacagga

SEQ ID NO: 34895 - DNA, 1949 bp, Mus musculus
cagcctgttggccatggacggtcaataactgctccacaagtttccacctgctggtcagccttccttaaactaccctggacactgctgagcctataggttgccatcagttatgctgaagccatggatcaacctctttcctgtgtctcccagcgcacatgtgcacgcaaggcagcctttccctttggctagataaatgtggtgaacttgccactagaaagggccagcagcaatgtgttcttaattcctagcacctgctatcgaactgtgccttatcaaaaccaaattgtggctattgatttttgccagggtccctgaggtaagtggggaaggacccctccccccacccccatctcccagttcctctggacatctcctccttccctttgctatgatttgacagggaggtctggtgagcattcaccttcctacccagaaagcttgaccaagttacatattctagagaatgtcccgagtgccaagcacgtttatacatagggcgtgtattccagtcttttctgtcattctgtgtgtgtgtgtgtgtacgtatgtgcacttacgtgtatggatccatatgtatgtgtgtacataatatatactctgtgataattatggccgtatactataaatacatatacacacagatactctttgtagaagtctctggggatttatgttgcagttcagcattccttgcttcttggaccctgctgattattctggactggctggggttagggatcatggctcatgttgtcagacagcagagtgatagaagaaaacacatacttttttcctgggccacaggtcttcttccttaatgaaaattttccctctggactctatgcttgttggagccaaaaatactgacttatggtaacactggttcaatttagcatgggtgtctttcatctaacaaattctctgttgtctttgctgatttggggaacagacctccactgtgattccagactctgtcttatgaccccattgatggggaccaaggctagaaataaatttacagagctgccagagtccaaagtaatcggtacgaagttttaaaaggaataaaggagagcccagagtgaacaagaggaacctaccatgaaatccccttcttgggaggacaaactggggcctctttttcttgtgttggaagacacctttctttatgcaactcttccttgtctactgaatgcccagctctccctgcctgctagcctgccagatcctagactgcaaactgggtgggcctatgtctttataaaacataaactgggtgggtctatgtctttatgaagcataatccctttggctgcatgagtccgttccttggaatcactggtccactgcccgtacaacttgttcctgtcttttcccagtctgattcgccaggaatggaatcaagagttcccaacactgtgttcccacaaaaccctacagaacccctaaaccttcccttactccacacgatgaggttggcagctggtcagagctcaataattttatactgtaataagatctttgaatgtgtatattcttattttttacaatcatttcattttgtatttaacatcaatggactgagtcaagattcagtaaataattgtaatgttcatatgcgatatcttatagtggtacaattttgtatttacctataaatataccaacatgattaaacccttttagtttcatcaatttgacagtctggggtcgggaaggtgaggagggagtccaggagttggctctggacagatggggaggtatggggtggaggagatccacaacttcagtatctgagacttaagttctgagcggcacctgtttgtgtactgtgtaggctgtgacaggctgagtgctaggtgctttgtctcttatgtcacttcattgaaactgcacagttctaatgaatatcctctgtcctttctattacatctgcctcccaattctcc

SEQ ID NO: 34896 - DNA, 1112 bp, Mus musculus
tatgtgagactctccaatgagatgtgaagaggtactcctcttcctccaatagtattagagcccggaggagggattcggcaatcagtctccaataggcggggttgagttagggactctccccgccaataggggcgtggagaaggtgagcggctcgctctcccctcccagcgagggaagagggcgggagtaggtctttgcggcatagtgattggctaaaccattgacggatgggtaatatatcccgtggcggagcgaggttaagccttccctcggcggggcgggccgggagagtgggcgggatttcccgggtaacagagaagcggccgcggcggtagaggcggcagagacggtttctccatcttcccccctccccttccccccttagagtttccctccctccctccctccttcccagtctgggcacccaggcctgtgaccgcttcgtgggcgcaaaggaggttgccagtccgctcttgcgggcctgtgcccgcgccgttccggggcctccgtgctgggtgcgaggctcacgccgggagcgacgcacaggctgagtggctggagcttttgcggtgagagcacgccgcaccgcggtccgcccagcagctgggtggcgggtaacccgggactggagggcgtgtgtttttcgggggggctgacctcggcttcccgtgcgtggctgtggggggcggagcggagccgcactcagtgcgggagggggaggagagcgtagtcccggtgcgcacggaggggcgggtcctagtcccgccgatcagaggcggggccggcgcgcgtgcggtggtggagaaaggggcgggacgggctcgcgctaaaggcccgcggctgtgaccccgccccttctcccttatgggcgggaccactggctgaactgctttgggtccgcggggcgtgcgggacgggaagagggtcccggcgtgtggctttcagggcgcggtggcgagggggcgtgaagcctgtgttcccccgccttagcgggatccggttggccggaaggcgcgtccggggctgtgatgccacgcccctcccgccccgccccctccgggatttccgcctccttagcagtgaagaggagctggggaaagcccgctgtggcg

SEQ ID NO: 34897 - DNA, 1196 bp, Mus musculus
tagctgggactctggttgctgcccagaaagttttttttttttattttcatggttcaatcgggctttacttacaagatggttaccctcagagaatctagtctgagaacaactagaatatttattatgcccagtaattcttactgggtatagtaactggttagaactagaatgtgtgtttaggagcccacttctacttaccttctttgcttaccctgtaacatcttgtcaggatttttaaggtcactagccatgaagagaatgtttgtttcatattggaagtttctgaggataatttgtaaagcatgatacatttacaagagagcatggaagacattttctaatgtcttctgttttatcagcttaattaaaggaaagtcatgtgtttgtaggttaagatgtgtcattcagcaccttctctttgctcaaaagactgcaatcaaaacagtaattaaaaactttaatgtaactgaaataacatattttagccatatcaaacatttccgaaaataattgttttgtggtttcggattcaaaacagtagtcctcctaatatcatccgcccattttatccttcttcagaaagaacagcggaatgccaaggaagctggaggaaactacactccagctttgactgagcaagaggtgtatgcccaggtggctcgactcttcaaaaaccaggaagatttgttgtctgaatttggacagttcctgccagatgccaacagctcagtggtaaatctcatctagacaaactacattatttaaaattgttaccataagtttgaaagctatagcaagaggggcctttttagatgatattttgatcagaattttaatctgtctcgtatgtcttcattagcttttaagcaaaacaactgctgagaaggttgattctgtgagaaatgaccatggaggcactgtgaagaagccccaactgaataacaagccacagaggcccagtcagaatggctgccagatccgcaggcactctggaacaggagccacacctccagtgaaggtgagcgtaggcaggtagaaggtatggtgctcggaccctgtatgtctagatcaggttggttcacgtcacagaaattgcccacaaagcttcttagcagctttgcaaaaggcaggtcagaaaagcacttgctctgtggattatatatagtgtgtgtttttcagttcctatattttttctt

SEQ ID NO: 34898 - DNA, 1104 bp, Mus musculus
agtttgacttctgtatctgattttgtccttggcgtcaagttgatgattagcaagcaggttccacagtgaggtaggcagctggtgggcttctcacaggacacaagtctgaattggtgtagtcattgttacactatcttgtacctctgggtatttgcagaaaacaaattatttaatagccttttctgtctctgtgactttaagagctatcctgatgaaggataatggtaatattacatacacatataactaaaagagtgtatgtaatatctcaaagtcttttttaaattcagtaaaagaaatggttatggatgatacagaatttgtatgtgtttatcattttggttgagtgatttgattaggctattaggctattatagctattgttggctatctctctactttttcataggcttaaaagctgataaattaaaaaccaataactggcatacagtacaaaaaatgtagtctgtcaaggattgtccatctgtgattcccagtgtgttctgtgtggtgcctcctgcaccacaggaggacataatctgtactaacaaacaggtgtgttgataagtcctgggcagaagatgcacagtgctaataattgtcttttagatctaaaactccagattcatagacctcgttatgtagttgtacattttctgtaaactgttatacattctacaactttgagtctttaagaaatgttttcaatgctgtgagtagaataatagcctatgtgcatgtgtgtgagagaaaacaatggtgtgtgcacatgaaaggcagggtttcttcgttgagcaccactgaccgctccagacagctggccctggcgcttccaggaaatctcatgtttatgcctcctatcttactgtaggtgtgctgacagttcagatcaaaccctcctgctgcttctggctttgtgatttctggaaatccctcctctgacctcaaacttgcttggcatgtgcttcattcattgaaccatcttttagtcccttgtttgtttggggtgtgtgcattagtgtgtgcattagtgtgtgggtgtacttgtacctacctgttcctgtatgtcagtgtgtatgtatgtgtggaggccaaaggtcaggt

SEQ ID NO: 34899 - DNA, 1107 bp, Mus musculus
gattgtttccttactatttgtaacaggtttatacaatttcagaaaagttcataagcaagatatgaacacattttgtagtcccagcctttaggtggcagagggaacaacttgccacaaattgaagggtagtgtggtctacatagcaagcccttgtctcagaacgaactaaggtgcaaggaaaggcagtgctgtgatagctctctctgctcccactggcctctggtcagcagtgctaaacagtgtgcaatgggttgcagttagcattggtaactgctagtcagtttatgtatcagtattaaactttatgaattatgtacatggcattttttttgccagaaaataaccttatgatagttgtaggtgtccttgttcatattttactggtaagagatccttacataccttgtatggaaatcacaactcaaattgggaggagtttgacaccctccttattctcccagctctgctgtgttctggtgctaggcctgagaccctctttgttcttttgttttaagcttgatgtggttcttgagaccaatcttgcaacaatccgggttttagaagcaatacagaaaaaactttctcgcttgtctgctgaggaacaagccaaatttcgcttggataacacccttggaggcacgtccgaagtcatccatcgaaaagcactccagaggatatatgctgacaaagcagctgatatcatcgatggcctgaggaagaacccctccattgctgttccgattgtccttaaaaggtatgtatcttctggcttttgtgtgctgtgtgacaggttcagtgtcccattaaatagggctctagttttctacctgagtatctaattggaatttcagttctttcctcagtagctcaacactagggatagagtagaatggcagaacatacgttaggggttttgtggaacaaatggaacagatgttgacaggtgagggtgaaagacttgaggtgcagctcggtggtcgagtgcttgcctatcatgcatgagtcctgagttcacacagagaaagcctgatgagtgtatggtagagtgtagtgcgttcacatttcagggttgggctttgtttctgttggtagaagggaacttaggac

SEQ ID NO: 34900 - DNA, 1579 bp, Mus musculus
tttagcccagtctatgtagccctggtctacatagtgagttttgggccaaccggagcaacatagtgaggctctgtcttaaatacatacatatatacataaatattgttttgtatttgaagggcttatttgcctattttatctgtttcttctttctctcttactttcattttagtcccatgagcgtgtaagcaagcgtctgcatcagcggttccaggcctgggtggataaatggaccaaggagcatgtgcctcgggaaatggcagcagagaccagcaaatggctcatgggtgaggggctcgagggcctggtaccctgcaccaccacctgtgatacagagactctgcactttgtgagcattaacaaatatcgtgtcaaatacggcacagtattcaaagccccttaactgcagagccagagcaggtagctcagaggtgtgtgtgtgtgtatgtgtgtgaatatgtgtgtgtatgtgtgtgtgtgggggcatgtgtactcatgtacactgaagaatcaaggaagatgcctttcaagccaccagtgcaaccaggcaccagcaggatacacgaaaggaatgcgaatggatggataccttaggaagctggaactggcacttttcccacgggtactacccagacccaacagggaatgaagtccatgcaagcacagagacaggcagcttgcttgcacacaccagcagagctcaactacaacttcctatgacctgagcaaccagatgctgtccccatttggatggatggatggatggaggtgcatcttgtcactgctccttttcccacctccaaaaaagagaggggaggggagccaggatttgatgataccctgacttgagcacagctaagatctctgttagattttatctgagacctgtttggctttggaattaataacttatggatttggtttctgagtccttgaagttcaccttcttccctcttctggttctcggcctcaacaaattccagtcagtcctcctttttagctcccatgggactgttttgtacctgcttctttactagtctgccctagtgccatccaccagcttctctctcacacgcacacatgcacacacacacaattttaacttggtttttcttttttgtaaataatgtacatactgtcaattttttattaaagaaatatgctttgatgtgctagcataactgctctagcttcttgtgtaccatagtaccatgtggcttcagatttagtacctataaacagatgtacaagacatttattacactttttaccaaagggagataccattgtagtacttttgtgtaaaacttgtctttcccccaacaacttactttctttttcctttttttttttttaaatgtaaataaagcttgattcttaaggaaataagtaacataagtcccttgtcctctccaaagagctgttgtaaagttgggactggctttaatttctccaggttacaaataggattttgctttaaataaataagtacttgtaattgtcaaattaacatatcaacagtgaggccagtgggatggctccatagataaaagtgtttgccacataagcctgacaagtt

SEQ ID NO: 34901 - DNA, 1071 bp, Mus musculus
ggtagaggttggtctgtgctgctgagctgccaggcagtcctcacggccttagccaagggagagcgtttccccagccatccgctggctcacgggtgggacaggggcggcttcgagcatgcgcccatcagctgctcctgcccaggctcttcggggacagctgctcggtgacactctccagcttcctgacgcccgagaggcttccctatgagaaggcggtgcagcagaacttcagccctgcgcaggtcggcgacagcttcggacccacgtgggtaacgcccagtttggcgaagctccgccccacgaccaaaccctagtctgctagatagcagagtggcgccctctgctgagagaagctcctttatccttcggcgtcttcacttgagtattttcatccctgctgcctctccccctttccctttattctttgaccatttctctgatgctgcacatgcatggagaacatcttaaagccgagggtttccactcctaggcccatcaaaatggctctcttacagatggtggacctgctggtttcgggtagaactggtcatccctgaagtttgggtgggccaggaagttcatctttgctgggaaagcgatggagaaagccttgtctggcgtgatggggaacctgtccaggtgaggtgtcctctcttagagccagatactgccacagattagcctggtttttggagaagccacagctgaatgaatgggtctccagagtaatttcatgatttcggaactgaggaaattgccagtgtttagacacacccgaagaggttatcagatcccattacagatggttgtaagccaccagaatttggacaccagtgttataaatccccagttttcataagctagttttattgtgtatagtacatatgtattgggggaaacttcaaatcattctaaaatgatataaagtaaggtattaagttatcttcccatgaataatgaatttcttttaactgcacttcacattccccagatgttaaatgttaaatgtcataccaggtttaatctttgtaatgctatgtgatgacactttatatccattatagattttaa

SEQ ID NO: 34902 - DNA, 1146 bp, Mus musculus
cctgcgggagctagggggccgagaggggggagtgcatccggcaataccacaggggcttatatctggggcagcactaggtaaagtcaggagttaggcacaaaagcttggtttgactgtcacaacctcaggcaaaaaaaaaaaaaaaaaaagtgtcggcaagataccttttgccaggcacaagggatcgattcaaagttcaggaacagaagctgaggaaggcctgtgtggctgccgcaggggtgagtggtgatgggtaggctaggggagaacaagaggagagaaacattggtgaggctaagcctcaaacgtccctgggagatggaagcagcattattaaaacgtataaaagagaaagaaagcctctgcaggtgcgttgtgctgaccaacagcggagactcacccttttacacacttatttctcttgttcctccagtcacccatttactcatttcttatattttttaggagaggacggttaaagagagggtcttgctatgtattcctcattgtcctgggcctcagactggttcccagcttcccctgatcttctcttcagcctcctcagtaagaactgggatgataggaaagggccactgtcgtggtttgaatgagaatggcctccacaggcttcccgtctcatcaggcggctgtactcacgtgttcaagcatgaactagcaagctcgcacacacatggggtggggagggagatgataaaaatgtcttaagaaacacagcgtgtggaatataagcagagtggaatattatacactgcctgccacaggtagcagcataggtgattttgaggatattatgctaggtggtaggtaggtcagttacagaaggacaaacactgagattccatttatgtgagaagtccacattaatcagacacacagagtgaggagaaagattgttgaagatggggtaggggaggagaggttgatagtaggaataaagttccagttgcctaagatgagcaagtgcagcatgcggtctgtagctaacactgttgtacagcaaactctctgttggattcttttttattgtcgttgtgctgtgtatatgatgtgtgtgtgtgtgtgggaggtattcatgtaccacagtgcacatgcggaagtcggagtcaggtctctctggccagttga

SEQ ID NO: 34903 - DNA, 1175 bp, Mus musculus
ctacatgtagatagagcactcatacataagaaaaattaaaaacaaacaaacaaaaaccaaaaaagaaaaagagggctgggcatgtcacttgggaggcagaggcaggtggatttctgagtttcaggcaagcctagtgtacagagtgagttctaggccacagttgtctcaaagcaaaaccaaacaaacaaaaagaaaagagaggatgatcatccattgctatggtagagtggtcaccgggtgtgcacaaggcacttcacccagcaggtggccagtctgcgacattccttcccacagtttgtcagacttagaagcagtcagtcccttggctccctgtcgttccctgagatgaatcattcaacaaacagaagccctgtatggcaggggagaaatgtcagttccccgaccctggctccaggatggagctgtgcttcacttagccaggggatcagggtgtctgattccagacgagactgtgtgctaataaaaagccagcagccagtacctgctctttttctggtaggtgagttctccccacactgtgagattttttttcccccctctataatgacttcaaagaagtatttctgcttagcctctcctccgactcctctcaggagcacagcatggcgatcattagattttcctactttgtgtctaactaatgttgggagctgtagtcaatatagtgtgttatggctgtgcctggcatgctcagaaggaaagcagagcaggaaagattgtcttcatctgcatccctctacccatcgagcaggtgccacacctggtagcagataagcctgttcagcagccagcgctccaagggtaccaggttccagacagcttttgtgaagcgattgctgttgatcctaaaggtcacagagtgggtcgtatgactacgtcctccagtggagaaactcaagtcctgcaaagacatatcctggccagggtgagggagggtagaggccagggtaggatcagcatgtacagatgactctgtgaagccagagctatgtgcggtagagggagggctagagaaatgttggagggagagcgtgggcatgtggattgggctggtgggaagccatagcccagggtgactaggttgtagagctatctggggtccgaggtttgaggttttaatgaaagagtctgtagttgagggtgcaatgacagac

SEQ ID NO: 34904 - DNA, 1130 bp, Mus musculus
gtgaggacacgatggacctggctggtgcagacggtggtgtgctcaaggagaggagcccacccgggcatctactagctatagtgtagaacctccgtacatgactgaagcagtcacatgacccctgaggtgctggcctccttggtaaatggggataaaatctccttcctaggaggctgttggaggtctgaaggatgcaggtgggagcgcccacaaacaggcacttggttaaagttcccttactcctcaatgggctggttctcacagcagtactggggatcttatcggggaaagaccgggggcggggggggggggaggtgttacgcagaggacgaagctggctgggagctctcaggaggtctggtggacacagaaaagtagcctcagctgcagctaaagaaataggggggctgagcgtgctggcgcacacctttaaccccagcacttgggaggcagaggcaggtggatttctgagttcaaggccagcctggtctacagagtgagttccaggacagccagggctacacagagaaaccctgcctcgaaagaaaaaaaaaaaaaaaaaaaagaagaagaagaaggagaaggagaaggagaagaaggggactctggagagagggaagtgacagacctgaggagtttctgaaagcctacaggtcatgccccaattgctcaagtctttcgggaggcagccttcaggggagatctcagggaaagatcaacctcagagcctaaaacaacacctgcccttgcctgagagcacctgtcctatcccagggcttgggagataaaatgggctcagggtcagggtgtggactcatcaaagcagacttcaaaagggaaaaggttttgcagcagctgggaccatggcctggataaccctccatctctggaggtagcccactttcctagcagcccagaatgagtcacccaaggatttacatttatttacatatcatttacatgagcctgtccccaggataagtagcttgatcgctctttgcctgtcttttttcactgtactcagacaatcccgtccaaacccaacagctggaattaggaaatggcaggaaggccagctgaggtcatggaacacagatggtaatggaaccaaatgtagacctcttattcac

SEQ ID NO: 34905 - DNA, 1361 bp, Mus musculus
aaagcagaggcagccactggggaagggtcacgtaatccctcacctagctctggtgccagcaccagcccaccaggtcccaccctgagggcccgcttccgcaacctgttagaaaatgcctggctcaatggtgtggcactgcctacttggggtcacaaggcctccggagcagatcgatcttcgcctcacccccagctcttgggcagccagacccatcatctgtagcattgttaccagggctattgggacagcccaccatccggggactgctgtgtacctgtcctgacatccagctgcccacggctaggagtggatatgaggctgagcccacctaaccgggcagagacttgctgaacttttaacttgaggatccttctcttgagaaaacctgtgggcattggagccaaccccacctggccttgaatcctgactgttgtgtcctgggcaagcacttcacctctcatgagcccttgttccccatttgtagaataagacaacacagcctacctcacaagggttgttgtggggatgatgtctgaaatacaactaccatgctttggtttgcttcttgcccgggataggcctgggacctcagtcaggctgtggaataacaagactgaggttggcagaactttattgtcaagtcttcatgtgtcttggaacccagttactctaagaggtacctggtacaatgtgtatgactcacgtgcttcttcccccagaccactgcaggtgtagggacctggcctggggctggcttgaagagcctaagactgttctggagtcatatgtctgacctacctgggctgcttctcacacccctgtagggttgtgtagagttgtatgcttctagagccaagcagctgcagggaccggacccgacaggctgagctcaatactgggagaaggtccagactgagcactcttggtatttcccaagactcttggggtctcctccctgcaagtgggctgtattcagctggtggctgataagttcctgtcttatttaagggttttgatgagactgcgccctgggggacagctattaaagcatttgggttgtttttggagctgggatctagctttgtacttgaggggtcatagatgagtgttgcatatcacccgtcaccatctggctgtcgtccctgctcctgttcaggatgtctacagcttctagtattccactcctacaggcccgctcacacctacctgctggccatccactccaccctgggaaagaccttcccgtgactatggagaatcttagaggcgggtgcctttatgtgtcaccacatctgtgtgcctgtctcctaggactgaagatggaagtgtcaccctcctttagtgtcccttcagtttcacca

SEQ ID NO: 34906 - DNA, 1390 bp, Mus musculus
tccagcccaggccaaacgagcgtcctggagtgcctattgttatccgggacagtccagttccccgcacctcaccagcactgcacccctgtgccaaggagcggcagtctgtcccacagaaggatgccaggcctcccagctccccaccaatgcccgtgattgacaacgtttttagtctggccccttaccgtgactacctggatgtgcagacaccagagcccagggctgagcgggactcggctccagccaccagtaagagccaagacaaagattgcaaggggaacctgcctgctcaggatggagcctccaggtctcactgctctcttcgtgaggaggtggctctggacttgagtgttaaaaagacgatggcagagggtgtccctgtcaaggtccccagtcctgaggtgcatgaaaagcccgctgaagctgtggatgggccaggtatagaaaacacagtgtcaggtctgcctggcctaaaaaagatggtcacagaaatccctgaagtaactgcagaagccacaccaaggaccaacttccatagctctgtggccttcatgttccgaaaattcaagatactccgtactgcgcccgtacctgcagctattgtctcatctcccactaccccggctcctgtccctgcgcctgcccctgcacagcctgtacccaaccccccgtctgtgccagtgggactgcagatcctcactcagcctttgccagtggcatgcttcaacctggccctgcctagcccaccagccatagtggcctccccggccccagcctctgctccacctccatcaccagctcctgctcctgctccagcctcgggtcctgctccatcgtctgctcaagttcccactgcagccccagtggactccccggaacagcacttcacagggctgcacacatccctctgtgatgccatctcaggctctgtggcccattctccaccagagaaactgcgggagtggcttgagacaactgggccgtggggccaggctgcgtggcaggactgccagggtgttcaggggctactaggcaaactgctgtcccagctgcagaagttcgtgtgcacacagcggtgccccttccctcatgtagtacgggctggtgccatctttgtgcccatccatctggtgaaggagcgtctctttccaaagctgccaccggcctctgtggaccacgtgttgcaggaccaccgagtggaactacggcccaccactctgtcggaggagcgtgcgctgcgtgaacgtgccctgcacggctgcacctcgcgcatgctgaagctgctggcactgcgtcagctgcctgacatctatcctgacctgctgggcctacagtggcatgactgtgtccgccgccagctgggtgagcatggggcagctctgtagccact

SEQ ID NO: 34907 - DNA, 1105 bp, Mus musculus
ttctttttaaaatgattttcatttatttgtttgttttattgtatgtgggtacactatagctagctgtacagatggttgtgagccttcgtgtgattgttgggattgaatttttaggacctctgctcactctgggctaccctgctccggttggcccttcttggcttgggtagttccttggcaggctcggtccctgctcgctccagcccaaagatttctttattattatagataagtacactgtagctgacttcagtcgcaccagaagagggcgtcagatctcattatgggtggttgtgagccactgtgtggttgatgggaattgaactccggacctttggaagagcagtcagtgctcttaccagctgagccatctcgccagccccaagatttttcataaaataaaataaaaatgacagggtcctggtatgtattccagtctgaccctgaacttgagattctcttgtctcaggctccagagggctgatattacaggcgcatgtcaccatacctagcattcaaccatggtttgatatcaagcttgcatgacttcagaattcaaaatctcaagactctgagttggaaataatcagggagggaaggtctgaactggtctgctctggtgtgtgacctggtggtatggtctggctttgggagatggtgaggctgcccagtcaaaaggatggctgtataggtcgctgtttgtatctgtgtgaccttggacaactgtttatctctcagggagctgcagcttgcccatctctgaacaagggacaataccttccttatagggctacagtaagggttcttgagataatggatgacgaagggtacagtgtgctggatgttttcattctcagagtttagttgtagaactgttgctacccagaagtagaactgttgctgagtagagcgtgaacagtctggttcctagctttccagtgaatagtgaagctggcctcctgtccccctgggattgcttctctgtccttcagttgtgagcctgtgtggagacttaggctgttgggcagggtcattgtatacaggatggaggtctgttggaggtatctgggtcactgtgggtgctgattgggtatctcctgtgtct

SEQ ID NO: 34908 - DNA, 2762 bp, Mus musculus
gcctcttaaatcatgatcctccttgcccctttagggcttgcagggtgcaacactgtgccctgcgtgctgtcctctgcttaaccattccctgtggttgcttctgcaggttcataagttctaccggggtagcggaggcagtttcagcaaggctcaggaggaatggaccactggagcgtggaagaacccacatgtgcagcaggcagcccagaatgcagccatgggggctgctcagggtgccatgaatcaaccgcagactcagtattctgccactcccaactacacgtactccaatgagatgtgagccagccaagcccaccaggaggcagggctgggggccagtgggacagggggcttaagccacatcttctgtgtggtgaccaagcagggttcccccttcccttttctcctccccaactttgtacaaagaatcagagttatatatatatatatatatatgtgtgtacgtatatgtatatgtctatccctgcccccacctttgggtcctctgggaactttgcactgcacaagaagtgttttctgtgcattggtagccaagcctatgtccccttgtgagataatgtacagtggcgatctcttgttgtggtgctagatgtatgtttagaactaaaccagccccctccatccatcaggttgtcccctctgaccctggcccagagactccacaggccagggggaggcctagcagggagccagataccttgtgcagggtgatgagcctaagctatttctgcctttagtcccattgggaagcaacagtattagtgttcatggtgataggcaggttctaggcgatgggacagagaggatgtccccttgctccctgtagtcctccctccacctcctcttcccctcgttcctccctcattgtgagattctttgtgctcatttccctagctggctcctccgtgatctttttcctccccatgtagcttttcgttgtcttcctaaagcggggtgtctcagttatgtctgcttttaagactacccagatacccccaatccgctccccagttccaggaagctgacatgggagctcagccaaccctgacgtggaaggggcacccagcttggggattctgagcccatttggtacttgatacgggggaggggggggaatggaaatgcagagctgatctccttgattctgcaagcctggcccgcagaggcaggcatctccttttccctctcctggcttccaccccttgctgcccagatccaccttgagccgctctgcatttcccgctggcttgtatgaggcacttgccaggtgtaaaggccgtggtggaacagagggcatcattggtcgctgggggaggtgtggctggccccagctcagaagggcttctagcttctcaaagtgaccactggattcctggaaggagtagctgttctaattgagtctggcagaaaggatagaggtcagaaggttaggtctgaagggggaagatctgaggagaagtcaaataggacccattgagagggtagttcacctctccagtctcccttgtcctggctacaggacacattctgcagagatgctcccaggcccagttcaagctgcaagcacaatgtcctgagtaggattcctggttggcaggaggaagggcaggatggctctgcctttagtttttagtttagtgttctgtccttccctcctcttccattcacgagaacgacaggattcgattccaggcctttccttagttctcttagaaccctcatctctctctagactgatcttagttcctgggactgtatctttcaagcagggtgtggacattgtctggtatcttattcctctgcatgaggcctgaggtgggtaggccttaccaaggagcagctggctgtttctcatctccttgcaacagaaacccacctaggctagggagactggaaaaccataccacattggtttgccttggaccctaagacttggtttcaggccaccttgagctttgatttttcagcttcttccttgtaagagaatccaagagtgtctggaaagttcctttcctgttgactccctaggcttagttgattctctcccctactgttttctctatggagagcagttgtcatagctcctgctaccctgagagattctagggctaggctcttcctcctcttcccttctcccagctccctttctcttagtcctctgttacttccaggaaagctgtgatccagctgccagcctagcatccacagctgttgggtgttacccccagtcaacttcctgtcctatcggcctctcctctttcctggctcacacctattggccatgcctggcactgcccttgggaaagcctgtcaccagtgtctggcccagctgctcaggcactgggatgctgcatcttcaggcaactatgcactttgatgaggagagagtgagagagatggggccgggcacagatggtttgcttgaggggtgggagggcctggtggatgctgggagtcctcctgtctgtcgccagccagtgacctgcttttgcattctcctggtgcccactgccccttgtttctgagagacacaaactatcccctcattggcagttgacctgcccgagccagtgtctatctgtgtaactggatgaatataataaagggatcatttgaccctgtatgtccctctgtgttacttgtctccatgtgggtctcaatgaagccttgatgtgggatgtgaagcagggttgtggaattgagttgagtggatctgtgatgccaaaaaccatgtattttgt

SEQ ID NO: 34909 - DNA, 1547 bp, Mus musculus
cagatcaccagaaagcctttaaaaaaataaaaaaagccctactgatggccagcctttgcctgacctaaccaagcctttcactctttatgtggaagagagatcacgggtcaccagaggaatccttactcagactttgggactttaaaaaaggccagtggcttacatatccaagaagttagatcctgttgccagcgggtggttttcttgcctgtaagctattgctgccatagctctgcttgtcaaggatgctaataagctcactctgggacagcaaataactgtagtggcatcccacactcttgaaagcattatctgaaagccccctgactgatggatgacgaccaacgatattgtgacacatcagagctttttgttgactgaacaagtgacctttgctccacctgctgtcctcaatctcactaccctactgcctgagacttcacctactcatcactttctggcaaaagaaactggtactcaaaatgatctgaaggatcagatcagccttggcctgagagttcgagctggtacactgatggcagtagcctcgaggttgaaggtaagcagaaggcggaggcagcagtacggtggtggacagaaaccaagtaatctaggccagcagcctccctgaagggacatcagccgaaaaagctaaacttgtgactttgatagaaagaaggctgttgacatctgcagagaaggacccaagatgctgtggctaaaagaaaatcagatggcaaatctaaccgccaaacatgtgtcccaaagaacaatgatcctggcagtcaaggagcctaaagattattatgtcagagagaccagctttagatacacccctgagcactatcaagttatggacattatttaccccacctgggggccaaaaaattaaaaggcgtggttaggtcctttgactactatgttacaggactctctgacttggcagaagaaatagtcaaaagctacaaggactgtgctatgacgaagtagaatttacagaaattaagccagctagatatagcaacaagtgcttattagtgtttatagacaccgtttcaagatagataaaagcttttcctaccaggactgagatgaccaatgtgatagccaagaagatcctaaaaagaaatcttcccgaagtaatggacctgcctttgttgcccaggtaaatcagggactggccaagatattagagattaattagaagttacattgtacatacaagctccaaagctcaggacaggtagaaaggataaataaaattctaaaagagactggtacagacttggtgctccttccccatgcccatcactgtcttaaatgatgtgtttaaacctacatgttgttgtaataataatctgtatgctaagttaaaaggcttgcaggtggtgcagaaagaaggctggtcacaattggctacagggaatgagccagttaccacaaaagacatctcaccagttgcagccagagatctgatccacgtacacctacatcatgcccagaccctcaagcctcactagaagggtccctgcctagttctgtttaca

SEQ ID NO: 34910 - DNA, 2091 bp, Mus musculus
gatgcccttgcgctggaaccccgcagggctcagggaccaggcttgagtcggcatttgaaccttaagcatagtatttatttaggttgttcctgcataaggtctggttcagggagaacagatggtgacttcggagaacttcacctcccaaatcacccgtggctctgtgaccccagccgctgagctccagcgctggatcccaaaggctggagggactgggacaagtcacgcagagttggggcgggtcctgggcgaaggggcgggtcctatctggctcccaggcggagcttctgctaaaggcgcggagcacaaggtgccgagggcgcagagtagaacatcactaccctgtagaagtctgggctgaagactgcacgttcccagcccaccctccaaccttcactcggcgccggcaccccaatccctgccagctctcgcccggcacgacccgcggccatgcagccccgggcttgaggcggccccatggcaaaacctgcgatcccagcgacgacggcgcatggagaacttccgtaaggtgcgctcggaggaggcgccggcgggggacggtgatgagggtggcagcccgaactctggcccttttgcagatctggcacccggtgctgtacacatgcgggtcaaggagggcagcaagatccgcaacctactggccttcgccaccgccagcatggcgcagccagccacgcgcgccatcgtcttcagtggctgcggccgggccaccaccaagaccgtcacgtgcgccgagattctcaagcgccgcctggcgggcttacaccaggtcacgcggctgcgctaccggagcgtgcgcgaggtgtggcagagcctcccgcctgggcccacaccgggtcagacgcccagcgatccggccgccagtctcagtgtacttaagaatgtaccgagcctcgccatcctactttcaaaggacgcactggatccacgacaacttggctaccagcctccgaacctcagtcctggtccttcgtcccctcctacggtgtcgacgtccaagaggagcctgggggaatctgctgctgaagaaggcaccgctaagcggtctcagcctgagccagaggctgagaatgaggacaggaccgcctgagaattctcgcctctgagccacccagaccgactgaatcatatatcttcaacactcctgcatacctttcaacacacgcacctttcatacctgggttttaaggggcccatgttcctggacaccggtcctcagaatgacagcgcggatcccaaggcgacaggagagagctcaggaatgagaagagaggatccttgaagtccaaggaaactttgtgggacatgttaccagaagccacagaacaccacccacacctttgctaggccgtcttttttagggaagcatggtgggtagtgggactcttgagctttcttggggacccagacgttaaaagcacccagtatgcatggatgctgacagttgaggctttaaaaatcatctttgctgttaactgagagcgggagctacggagctgattacttgaggatggccaagttgaaaatgtccggaccctattctgcacccccacacacacacacaccctagcaattcccttttagcatccctcccccacccgccttgcatgatggctgagaggggacttaggacaaaatctgccatgcttcctccccgagtcctgctggagtcttgcttccaataaaacaaacgtgaaaatggctctgtcttcagttttgttctttttttctttttccttacccactcgcctgtgcagagaccactttggcatgcttgccttcaaccctattagcctttggagtcttcaaggtcagacacagagactggggcagtgtcaaaatgttgaaagagggacttgtggtggagggggccggggtctgtgtcactgttgtatcaccacaagggaaaggaagcagttttgctacttctctgggaggggaaggaggggggagcattgatgagctggaggcggcagcctgccaaggccggcagaccatgctaaggttctaaccttgctcgctcctcgcagtagacattcttacccagaggcaggcacaaagccccaagag

SEQ ID NO: 34911 - DNA, 1162 bp, Mus musculus
gaggagctgggccttgacaaagtgtaaactcccttcggtaagtagcagttcaaagagtggtgggctgatggcagcactgtcctgtgggtttttgtgtgtgtttgtgccacagcaacggtgtgaaattcagaagacatttttttctagtcagttttttcctatcatgtcagtccgagggcttcatctcaggttgtctggctctgcagcaagtgtctttacctgctcagccatcttgatcagctctgaaattactatcctgtctatgttgttctgactgctaggattacctggctttaaacttttctgattaggaaaaaaaggctaagtaccagtggtgtaaatgatgaagaggctacaaagtcaggcccttgtaaattgacggaggctgtattaaagcaggaagtgctccagggtggaggctgtttcctggggctgtagttccaaaggtcattttaaataaaatgtcttcattttagcactttactggctaattctgtgctttttttttttctctccctctctgcagatgggcttcctaaggacttaactgctattgctacttgattgaaacagttgcctggaaatgttttatttgaacaaattttcctttgagtatcaaaccatgtaatagtaacttggactttaataaagggaaatgagtttgaactgaaattaggtcttgtgatgttgtctgcattgagaagcagaggctgagctgggtatgggggcacagtcttagtcccagctcatgggtggcagagagagacaggtggatctcttgagtttgaggtcagccaagggtacataaagtcttaaagacagtcagcaaggtgatgtggagaaaagtgctgtgcagcagccagctcttctctgcctgctctcggcagcaccttgttagcttagacatcagagtatttgtctttgctgtgattggtttgcaggcattgtggttaaagactagagaaaggggcttactccttccttgaaagtactaagggaacagccctatttaacttcaggagctccataatcccagcaagcttctcactgcttcctgcttataggtctgtgggacagcagtacggctgtgttactccaacaggaaaacagtattaagttaaatgtagatgctgcggggagttttagtaagtttgatttttgt

SEQ ID NO: 34912 - DNA, 1154 bp, Mus musculus
agggaggagaaacttcctgaggttcttatgctgattgctaagaaaaccatttacagacattctgactcctcctgaggagggagaagaaagaacgaactccttcactcaggctgtgctgggggtatggtgagaggcagagagcagcactttatggcttgcaggaggaatctcaaagaatacagctgggaagcgccaagtgggttgttccttaggttacagcaaggaatctaacttaatgatggagtgggcctgtggctttcagaacctctgaacttggaccattctgctggccctgctgtctggatgggcttagtaactctgttggcccttcccctgttacaagagaactgctctgttgtatatgtttatttatctgtagttccttggcattggagagtttctccgacttttttttttttttttgaggtaaaaattggattggcaggaatctgcagtttttgttattaccagcagagggagctgctgggaagttagtgccttcctatgtttagctgtgtaagcttttgagaagtattgatggatgagaggtgtcctggtgtagctgtgtgactctggcctacatggaaatgtttagacaggatgggaaggggagacttaagccagctcctggaccccacttgagttgatgaatctgcagtgcaaggaggccttccctctaacaaggcacatttctctccccagcacagggctcacaggctggtagagcacttgcctagcctgtgcaaggctagggctgatgcacaaaacaaaacaaaaaaaaaagcctctgggagaacacagctaagccccaagcctgagactcagtactaagcctcttcctggaatctagttttcccagtccccctctgcccgggtcctcctctttggggttttttttttttttttggtttttcgagacagggtttctctgtgtagccccctggctgtcctggaacttactctgtagaccaggctgaccttgaactcagaaatccacctgcccctgcctcccaagtgctgggattaaaggcgtgcgccaccactgcctggcctctttgctttatcttacccaggtgtgtggtgaggcttggggtagatacggttcccagcataaggggcggcaatagtcagagttaggggttgggcaccacatg

SEQ ID NO: 34913 - DNA, 1380 bp, Mus musculus
ctgtttgccccagcacagagtcaagatgacccctatctctctatctatgatcctcctgtgccagacttcactgttatgaagatggaggtaagtaggtggaccaggaaggttccctgggtagcatgtgaagcttacatggggatacctggggctggatttcctgtcaagcccacttagtcggggcagccacagagcccatctgtctctctgccagggaccagatgtgggccttcgtagtgccaagagcttgaataatgggaaaggaggcagcaaagcccccaaggtggtctagaacccaggagtagagtgcaaattatactattctatcacttctttctgacaggtccctagctctgtcactgaatacaaagtctcaacactagactctgccagcatccttctgatggtccaagggacagtgacagctatcataccttcagcccatgcagaaatccctctgtaccgtggtggagtgctcttcattgcagccaatgagagtgtcttactgaagattactgtgcccaaggatctgctgatattccgggcctgctgtctgctgtagagactagttcttagtctctctgcctaccactgtatcctggccagctccatatttcaggtgtagcccaatccctgtccctgttgtgcactctttgaatgtatactggattagaagcagtaaatttggcattagtaactccaggagcatgcccaggctggaccatcttcaggacaaggtttctgtatgcatgaagcctgaggcctgccactcttctgtaccctctcaacactgttacctctgagccagtgtgtccaccaaagaggcaaccactctgccctagctgaggtgttaggctaacaaagcatgcatcccccagcattagctcagcatgctctcagctgcagagaagggaagggaagggaagggaaggaagggaaggggtaggccagtggactaatgaagcgtattccctctagctccgtcaaagtaattaaagatcacttgtgttgaggatacagagtgaagagcagtcagcctttggtatgcctgtccctgatgtgggaggaaggagctctctgatgatgtccaggtttggtttgaattcttcatacagcttcgtgggggtgggcaggctggattccagaatgcttttacaggaaggggtgggagaggaagccagctccagcctcagttggacagcttgcagggaggccttctgctcctgtagttgactttttctgagactgtcttcatgttccaaaggttggctttggagctctgcttctgcttcctaatggcccctggtgtttgcacatggtatgtatgtgcacatggtatgtatgtgcacatggcatgtatgtgcacatggcatgtatgtg

SEQ ID NO: 34914 - DNA, 1117 bp, Mus musculus
agtcccccagtggctctactctaggtgagctgtgttctgggtgggagcacagaagtctcccaagtcctcttccggtgagctcctggtgttcttcacaaccgagtcatgaccctgtgcctgctacgactcatgtgtgatagcaccttgtgccctctgggggccctccctagcctctcttcagacttctgaatgtacagtaagtggggttggttgagacttgggggatgaggaggggacgaagacaagtaagtcaagtcctgcccagcctctaccagtcttgtgagagggtagatgtctgcttgttttggcttctctcctcccaagggactctgcccctctgccttagcttggcccctgcctatcttcagcaatactcacctcttaaaacgcttagggtcttttggaagaaatcagtcctgaactatgtcctgcaggcaggactgccgagccttctttctgagggttcttcccacaatggagtctaggtccctttctacttgtcctgggggctccacgggtgtgtcactgcagtggcacctaagaagccgctgtggaaacctggaccctgtgttttgtcagtactgcgagagctcaccaagctggccagtctcctgcccctgggaactggggccctcctgagactaccctcatgctgtcagccctagagccaccaagtggtaatgtcagccaccggggttttgtaaacttcctggtattattttcctccatgtacagatgtatatgtcatgtctcaatttttgtgcttaaataaaaagattttcggacagcactggccctgatgtcaatggtggacttgggagggctatagcctactgaagtacagactaagggcctactaagataggtgaggtgacagttaaggttgttggtggctgagctgtgctggacgacagaccactcaactctagggaaagagttgaaaggcagaatcgaggaccctggcaatggcaacttggtctcttccaaaggcatttaaattgtttttcgccaagcatagtggcacataccgttagtcccagcactccgaggccagactgctctacaaagtaagttccaggagagccagggctactcagagaaaccttgtcttccaaaa

SEQ ID NO: 34915 - DNA, 1099 bp, Mus musculus
tgttctgcaaagaggacgtcatgcctcttcaggacacttgctaccagacagctgctgtacctgggccacccctccctgggagcctttattccaaccctactttttttcttgcactggaatgggacactcggataccctcagggactacctacctgacagtatgctctcggctctcagacctctccagtcttcctgcgagctcagagctgccatccttttcagttctttaagacaatccttcatgcatgaaagtcatgccctttgtaaaggtggaatacatgtgagaaccccagaccttccctgccttggcatggaggaggggtcctcatacccccacttacagctctctttgaggggatatgccacactagtcacatggtggaccctgagctagagctgggtcttggctgggtcttcccctctgtcctattaagctatggatacatccacagcttataccctgtatgagctggagaagaacttacgtatctggagttactggaagattgctctttttttttttcttctttaaacaccccctcccccaggtcatcatcttgtttcagatttttattcaaattcttattgaaggctgatttttgaataaggagcagaggagctgttctgccacaaatgacccccaaatgacaggcactgagactttctttcttccttccttccttccttccttccttccttccttccttccttccttccttccttcctttctttctttctttctttctttctttctttctttctttctttctttctttctttctttcttctttcttcctctgtgtgtgtgtggggtgtgtgtgtgtgtgtgtgtgtgtgtgtgtgtgtgtgtgtgaagggttatttctaaagttagagaatactggtgattttcaatcattctgcccttaaccgcctccttagggcaaaatggaacaccctccttgctagaggctggatgtatgtaaagactatagttcattgtttctctattaaattattttccatacttatgcatttcttcttgccttggaaaaataggtgaagtgatcctgctcataccaggagaagctggggagcctgactagtgtggcccagaggg

SEQ ID NO: 34916 - DNA, 1643 bp, Mus musculus
tccttctctgggaaatctattccttcgggcgagtgccttacccaagaattgtgagtatgggtctggaggccagtgtgtggctgaagccgagggagggtggggcggcaagagcatcccacgggaaccgcctgtctgtctggagcctgggcctctggtctgtcctgagtagcctccaggccattccctgacttcttagagaggggcttctgggtagggctccctctgtaagacgctgagctgactcacacaccatctgctcacagcccctgaaggacgtcgtccctcgggtggaaaagggctataagatggacgctccggatggctgcccgcccgcagtctacgaggtgatgaagaactgctggcacctggatgctgccacacggcccacgtttttgcagcttcgggaacagctcgagcacatcaagacccatgagctgcacctgtgacctctgcctccgccaaggccatgggccggcagggacagggcctcggagattacagatctggtgccctgctgcttgctgggcctgaacttgaactgagccccagccggctggtaggcctcttgcctctgacctgcctgtcccttctggcccccagggaccccacctaggcctggcatcttctctcatggacccacctatagggcttggggtgcccactgaaggggctgaggagaggaggccaaggaacaggaggagtgccgtgcagctggcctcctcaaggccccaccattcgccttcttagagttttattcctttccttttttgagatttttttccgtgtgtttattttttattatttttcaacataaggagaaagaaagtacccagcaaatgggcattttacaagaagtacgaatcttatttttcctgtcctgcccctgggggtggggaggaatcagcctctctctagggacccatcaccccagcccgtcccccatcccgtgttccatgtccagtgttgcctcggtcgcctgtgtttgcgcttgaccatgttgcgctgtttgcatgtgcccaaggcaggcgtctgtcgggggcttggatttcatgtgctgtggccgctcacccacaccgccttgtgagatggaatcaataaaccactccatgaggacaccgccacccagcctcggcgcttcctccgccgagcctgcctgtctgcccagtcgtcttcccatgccatcttgtccatccccctgtctctgtgagtggggctgagagggaagcatggccaggagatgtaaccgcctctttgtgtcagctgcacgagccagtgtcctgtgtctgcccgtggggaagtgctcaccgctgtccatctctgccagctactacccgagcctgagctcctgggctgcctcgggctctgggaccggtccttggtatgctgctggggattctggctgcttctgccgtgttgtccaggcctgaagcacaaagaagtgaagtcctggcgtggccagatgggatgtggctctggggtgagagcccagataaacatgcctcaggccacactgacctcaagggtgatgggaaggggagcccctggggcttctcacgtctcatctaacatgtgacagctttgctcttccccaccctactgtgtgccaagccctgtgccctcttgggctttgcatggagcgaggc

SEQ ID NO: 34917 - DNA, 1188 bp, Mus musculus
actgtcagaacactactgggaatgagccacaagggaggtagtactacccagcaccacgagagaattggcttaggtctgcagagtcctaccttcccaccccccaactcccgtgaggagagcagagtgggaagtggctggaccccggaggaagagaagtggtatgggccggactcccgggcgtttgccctttcccgttcagggcttccctgaaggtatcctggcttgtctggttctgaactctacttcagtcgttgcacagaggttctattggctccaagcagcccagggccatgccacctccctttgtgcctgatagaaggccgggtccttgaactaagcctgtcacccttgacctgccagaggatcaggcttaaagcaagggacctctgacccttgggtggagaaactgggcagggcttccagtctgcgtagaggtgacactgggcattggtactgtaccccgttccccccacccccacccccagcatcctcatcagtctattttcccaggcttctcaggacccagaccagttatttggaaggggtgtgtccagtcactggatctttggagcttaagtaggagttttttttttttttttttgatcattttgtatagcagggaactgaggcccaaggggcaggtcatattccaggctcctgatggagggaggctagctgtctctcattcccacttctgcaatgatggatggctggaggtggaggggaaccagacccactctgtaactaccagggacactggcagtctccagcctgacccaagagggaccttgtggggtgagcgagcacgtgttcccttgcagagggctagagaagagggaaagggcttccggcctcagtgctgtcttcttacaggccgagatatcgtatgcattgcttataagacttcctctcagtgcgtgggactgggtcctaatcgtgtgggccatctgtgtggtgtggtgtggttaggtgtgcagaagcctggttctgggcagctttgaaacagcctggtagttagttctgaccctgcctttcccacatttaccagatggctcagtcagaacctgaatggggtcagcgtaggcagagtggcagacaaccttggactgaaagtgtcagtatgggggaatgttgacacttggggcttgtttctgtctccctggaccctagatgtcgtagtgtctcggt

SEQ ID NO: 34918 - DNA, 2949 bp, Mus musculus
tttgtggaccttgtagactatctcttgggtttatttcttctgtgagagaacaaaacatacttcaaacttgcctgccaccttcccttaaccagggaaggctttcccactggcatgtatgtcaggggtggaccagtggctccaggcatctttcaatcctaccctgcctccattaaactggagctttgtttacagacataggcagctctaagactgtgtcaggtttacagccactgggtgtgggctggcacattgcggggatgggccagaacctgttagggcctccagccactcttatttcagaaggctttatgtctcctatgcttcctttggccctgcaaccaggcagcccacttgtcctgtaatcattagatcaggctgcatggcagctatccagaagacaaacccgtgtgtgtctctgcttccccccaaggctaccagagtttgtttggaaactttggaccctcctcagatgttccaattttatgttgggacttttcctgaggagtgtgtcaggatgactgtggtaaagactttggactggctgctctgctgtcatcagcagttttgtgcctgtcaagctacaatgcccatctcctagttaggaaccagaccttcatgatacagcttttcagtattggggagaccttggaggagcttggtgcttctaccatcatttcctacctccttgtccataaatacgcctccgtctgcccctctgtctctggaaatggccgttttcagctatcccaggacaggttacatgtcccccatcctgccatggcttcactccagttcttatgtttaggctttaatcctttatagttgccctcctcaggtgtatagttggaactagtggcctgtctcaaacatgccaaaaatgagcccagttctagatgacagtagtgggattcagccatgcgaacatcgcactgctcaggtcctacctagggcattatcctcaggatcttcctaggcttgggtccttcaggttaggagggtaggaccatgcctggagcctcagcagagacctttgtaaaggtcttgtactttgaagctttctactgtgcccagcactggttgaggggtataggtggacaggcaggtgggcttgctaaaatgtttgggtacagagtaaaccctagtaccatgaatttttcaggctgcttccttgtaggaacagatgatgatagcctttccgtctcttctcttcagttatctccagctccaggaaagaggccagaggactgggagcctcagctgcacgacagaactttagcttttaagctggacctctttttctaaaggcggggttacaattgggacagcaggcagccactacaggctactagacacacataagatggtagaactctggtcctgaagatggttagcattcggcagttctccctgctcttggcctggacctgcctagagttgaaagtgtgttactcctacctgcagctctttttggaagtttctgctcaatggctggtttcagtcaggtggtcatatttgtcactaatgcatgcagctcttgggaaacccaaagccagcacaataaagtgacagaaacctgtgctatctaaactgcttcctagagtgaagtgctgcttctctaatccctaggagcctaccctgatcactgggtatgtacatagagacatggtggctgaggcacaactaggttctaatagtgagctattgccctttaaatgaaaatgcaagagcctttcctttctaggtctggcaagtctcctggggccaaaactctacttaaccttagagcagttgttctcaaccttccaaatgcagtgaccttaaaactgttttcattgctacttcatagcagtttactaatatacatcataatgtaaatgttttcctatggtcttaggtgacccctgtggaaggtggttcagttcccaaaggggttgtcacccatagattgagaaccactgccctaaaagggatgttccagcttctagcttatttattggcttgcctttctgtgtctggcccaaaccacacttggctttccacaagctgagctgctaagaaagactttattaataagtcagtcagcgtagggagagggcaaggagcctggagatggacacactggtaccagggggttacaaacagtaagaaacactttattataactttacaacatataaatagcttgggtccaatctgtgctttctggcagccgggcaccacattcccccttcccttgcaggctcctgccttccttcacattgcactgttcatcggtggctctggctctgaggccagtgggagaggctggagaaaaggggccagcagcccagtccagctctccaactcttcgtgtgctggcctgcacctgtcatctgctggggttacggctgctgtggaaggaccgctcctcaggggtcaggccagcaaagaaggggtgcagcaaggcttctgccaatgtgatgcgctgagcagggtcgaactctaacatcctcctcatcaggtcaaacagctgcacatgctccagggagtcctgcagcatgtaactctgctcaaggacacaaggtgcctcagttggacggcagggttgtgggaagccaccgcagtccccttgcctctgggatgccttgctgggatgggttgaggaggcaatgatgcctccttggaggactacttctgccttccaggacagaacagccactcatttcctttcatgctcagaacttaggctactgggtgggatcttgctgggttggtacctctaccccacatgcaaagttctgatgggtgggtagaaatcacctctgcaaaatgcacttgtccaggtaccaaattacagttgacaggcctccttagtcacatctaggtcttccctccccctgcctcagtcctgcctaattcttcccaaaattcagagaagagagagggacaggaaatagcagtctgacagtt

SEQ ID NO: 34919 - DNA, 1241 bp, Mus musculus
ttagggctcccagaggtttacataaattgcctcccaatcctgctcatacacaagtacctatttcatctttggactgtgctggtgagatggagcagccttgatggatttgtttaaaaggtgcttggccaggcaagcctaggactatgcactactagaggttgggtgtgagcaattgaaggcttggaaagcaaacaagctgtgctctcatgcctggccatctggtggacaaaatgtgaaggggctggatatgggtgaaaacggtgccagactcacgtagccatctctctgaactggctgctgatcccatttgggagtctccggtattggatctaagtactccgtggttaaggaatacttgtcctacttcccagtgtagacctacagccacgtcttcttggctccttcagagatagggcacaagaaagagtgccggagtaggaggagctagaagggatggctatgatgctgttaaagaggaagcacctggtatgggactctagttggtctgagggccactaaaatttgcctcaggcaagcagcttagatacctgattgtggctcctttctgggctgatactctggatgggtcagcaagagctgggcaggccttctgggcccaggcccacttggctggaacctgataggagtagggactattggtgagacattgtgtctttgctcaagggtcagagttctcatttctactgtggttcctcactgactgaagagttttgaatttctttgagttgagtccagttcattgctttagccaggcaagtttcagtttagtactttggctctgtgccaccagttcattagctccaggcttctagaacatttaggttataggatcccataggcatgaagaaattgagcaaaaaacctctccattcctcctgtccttggcatccccgtggcagtgctcagcatcccactacatctacttctgtatctgggccctggcttgcatagtttgagtgttcaggcccctgggccaggctggagaggcacctgtttgtttattcacttggcagaggagggagtcatccacccattgtctgctgttctgtcactgtgacatcagagttcttctttacttcataaacccctgggaggggctacccctaaacagaacaatgggcctcttcttcaggagcacctggctgcaccaggcagccctgtggctggaagcagtgagctgtgtgttgagcagggctttctctttcttgtggcctagatgc

SEQ ID NO: 34920 - DNA, 2560 bp, Mus musculus
cacagaatttacctcacctcatggagcccacaacagacaccatctggccagatgttaaatttggaagagtccgtctggccaagctccattcaggttctgctgtattctagggggcaggacagagtagcgttgtccaatcagggattgtcttggagaactgggtggggcatctgggcatccagctttcccagggttccccaaccacctcccaacccagagtagtatatcgacaatctgtaaggcgacttggggctggaggcttttcacttcccttcccccttaatttatttcccttctgctgccttctgccttcaccccaggatcaccagacttttagtctgcccagtcccccagtgtttaaatcccatttggggctctaggagtcaggagcttgtcttccttgctcttgttggctgagcatggggtgaggatgagtctgcccgggcctcctttagtctccaggagtggatctcccatatccaagtcttaaattcattcctcagggccctggaatacttttgttgttgttgttgttcctaagaaaaaagcatgttagggcaggctttgggttcagggtccctctgtatagagaggaagaagcactcacggtgcccaggccctgatacctacccaacaagactcccttctgatcctcaaaccttggcttcctgcctgcctatgttggccaactctcccaagataccactggtccctggtccctaacgtcgtctcgtggggccatctcagccctaccagcccaagacatggtgatgtcaggctcactgaaatacctcagatttgtaattgttgatatttgattcttcaggaagtatttgcatctctgtaatatttttttaatatgtgttttgctgactttaatttttaaatttttattgttgctgttgtagcaccaaagaaatgaaagcagatcaccccagccaggtgcagtttgcagccacctccctccaccctgcccatgccctggccagggggtgtagcaggtggggtgactcagggatcatcacagcaggaggatggggtggagggacccctgcttgctggtggctcctgaaaccacactggttctttccaccgcccctaccccagctgtcagggtagggcagaggatctttctgcctttagcaccctcaccttggggcagaggcaaatggctatgggccctgcctgaggctgagcttcaggaacaagaggatgctaagagctctgtcttctgttggcatgcagctggaacaggccactgtggtagagaaagggtagaccttatccagggctccattctcatcgcagtgtgcctcactctgttacataaagcatcatcacccagacccaccaggactactctggctgtagcagtggagaccacagcatggcccagcagtcctgtcctaggacaagaaagggaaaagcttatgcacaaacatacctcagcctggcgagcacagcactgctgacttggtcttatccctgccccaggacacacacactcagtaacacgcacacagcccttacactggggtctgaccctcttctgcctcataagccctatccacgaggcacatgcagggttgggcaaggggtctggtgctatgagaagcctgtttggccagtgtgtctcaggatttagtcataaaggatagacccttcctacccaggggtgacagggacagtgctgcaagacttttcagtcatcaaatactctttcctcaggcagcttgttcccctgtccctctcaatgcccctcactgccctcaagccagcagcaggctcctagccagaaaatgcaagagctgggtgccttgtgtgcccagcactagggctttggcccaagtggcgcttcccccgcaggtatagtcctgaaggccacgtggccatgtggttggccaggacagcctcctccccttctgtgtcttgtatgtattctaaccagaaaaaaaaaaaaaaatgtgatagcacatggtagcctaggccgtgactgaatacctcagatttcctctcacagcaagtgtctgtctgtgtcgtggttatcttctgtcttacatgttcttgaatgtttatatttcaataaagctctacctcttcacatgagccagtatgggatcctttcactgacttgaactggacaaggaccttcagaatgcaaagggacttcatggacccaggagccccaggtccccagcttctcctgaaccttctctcccttcactgtctgcttcggcagagggctggaactccgtttctcagccgtgttgtcagaatctcctgacagtactagtcaccatggcagtgctatggagtgtctgactagcaaggggggccacctctgtggcttagcacacccttgctgaactcactgggtcacattcagaagagatgtgtgtgggccctgggagggcctcgggctagtgggtttgtgtgccccctatattttagagaatggtccaaccagggcatggacttagaagggtgacctagaaccaaatgtcagtctgggtgtatgtcttctctgccaggctgctcactcttagcagcgcaggaagag

SEQ ID NO: 34921 - DNA, 1099 bp, Mus musculus
tatgtgccactacacctgggagaaagtctttttttgtatgtatgtgacgcatgtatgtgagtgtacagaagtatgcactcgtgcatgcatatgaagagaccagagcaggatgtcgggtgtttccccatctcatccaccttatttccttggcactgaatctgaatcttcttccagtttgggttagacagcatgggcttggtgtcagcttgctctctgccttcagccactggtattacaggcgtgtgcagccatgcctggctttttatgtgggagctggggacttgaacttaggtcgtaatgcttgcagagtgagtgttctttacctggtgagttgcttcctatctcctgagtgctgtctaattaaaataagattctcaggggatagaaaccaaattgctttgagaaacaaaatatgaataggcaggttttttgtttgtttgtatgatttctttgtagatttgatctactgtggccggaagctaaaagatgaccagacccttgacttctatggtattcagcctggatccacagtccatgttctccgaaaatcttggcctgagcctgatcagaaacctggtaagggagagtttgtcctcagttagatgggcagaactttctagtatctccaagggaagagcttgtgtgttcctgggatacagtcctgggtgattaccaaagtggtgataggtgctatctctatccttattggtttagatccccattggtaaattaagatgtgacgttgttattgttaacaccactaataatagatatatatatatttttttttttacttaataagttcattaaccattgttttctaaccatgtagtgtgtatggatctatttaaactctttagatcaacagttgatttttcagtaaactttacattcttttattatcgttgctctgttcattagacaaaagccaggaacttaatttgtttttgtagtgctatagttcgttcttggttaagcaactcttcccacaaattccctcaggtgatgatttgttcagtaagctaacaccgcctgctgagctcataacttacctccagaaatattccactagcattcaagtagctctcggagaaactct

SEQ ID NO: 34922 - DNA, 1165 bp, Mus musculus
gtgcacgcctttaatcccagcacttggaaggcagaggcaggtggatttctgagttctgagtccagcctggtccacaaagtgagttccaggacagccaggactacacagagaaaccctgtcttgaaaaaacaaaaccaaaacaacaacaaaaaaaacttcattggctagagagatggttaagagtaccagcttctcttcccgaggtcctgagttcaattcccagcaaccacatggtggctcacaaccatctgtaataggatccgaggccctcttctggtgtgtctgaagacagcgacagtgtactcatatacataaaaaaagcaacaacaaactcatttgttttcttcacattcaagtgtatcttcagtctttatgatgtccctatgctatggtcccaaacatcagtagctttgctgtgtgtcttctctttttcctttctatcctgaaaatacaaccttttaagtctatgactgttcatcaggagccttgctaatccttctgcctgacctgtctttccacagatccagtggcagcctcagctgcagcagttgcgtgacatgggcatccaggatgacgaactaagcctccgggccctacaggccactggaggtgatatccaagcagccctggaactcatctttgctggaggagccccatgaacttcttgtacctgaacacctagcaaattgcagaggctgttcctggcaagaagcacttgtgaagttgcttctagattccccacccaaccccaccccaatatatcatatgctccccttgcctgccgtgtccagtgcttggccttcttattgacctcaactggtgggagcagcttggcaagcaagatgcatggttgtggtgctgtggttcagggttcaggttgatccttacgtggtttagatcctgggccaatgtcatgggggatgctgtgtaatacccatattcatcttagacaagtccctagcaatagcccccatctattttggtgctttagagcctgaggctgaagtgagctacaacccagtcttcagggtagttgctgagttacagagacggccagaagagactatgacctctgatgaaagtctggggagtgaccaggtgaattctggatgtggcatgagaatatatcagctgattccatgtccctacactggctgtgtctcac

SEQ ID NO: 34923 - DNA, 2210 bp, Mus musculus
ctgtgaccaaacttactttctctaaaattcctgcagcagacaccagaggcaccccagacctagacctcccttctaaaagccagaaccaggaaggcttgcataaagaaggtgtggcctctgagctctcaagggccccagttgccaccaaccaccaccacaggtggccttatggctcttcctggatgttcgattcatgtaagtgacctacctgctgatgatccacaaataatactttagggtggcactgaccgctataccagcagccccatgagcactcaaagtgcctttcgaaccataatgccatcttgaatttgggtcctctcggccccaactgaccagaggccaactgtgttcacatttatttttcttaaagtacttttgttccaaaggggccttgtggcgccagagagctaggaactgtggctccgtccatacccgtttccacacactgacccttcagagttggttctttgtttatcaggcctcctgaccctccctgcacttagcccttccaagggacatccagtggagcactggcatctcgagcttgggaaggtctttagaattaggctctctggagcagggcctgtagtgttaacaagttctctgggtggttctattctgagcacccctgttgcctctgacgaccccccccccaccaaagggaagcagagaagcccctggccatgcacattgagtatgatgagcaaaaggccagaactccagtgtcctgtgagattggctgacccgagcgaggtattatctcggtcttcagccgctggagtttcagggctgggcagcaggttactggagaggcaggcaagaagcgtccttaccttctctcattccccagctctcattctgagcctttggtccctgaccttatggccatcttggaggtcagttgttccctgtggttgactgaactgctgttgctgtccacattccaccctgacccattccctgcttgcgcctagggtgttttccagatagcccagagttccagctttgacagcctgatgacctccattttcatatgaatgatgcctgcacccccacacctctgactcatcctatgggtgttccaaggcacccaatgctccaccctttaatacagtttcttatggttgttgtgacccccaaccataaaatcattttgttgctatttcatgtctgtaattttgctagttcatgaactgtaatgtaaacatctggtatgaagaatatctgatatgcgactcctatgaaagggtcgtttgaccccacccccaaccccaattgggtcacgaacaacaggttgagaactgctgctctaaggccttctgtagaagtccattcctatcacagtaaggctgaactctgaaaactatccattagagctctggttctgggtggggataaggatgggaggagaaaggttgagaccttggtctggctgtactggcaacgcggtgctgggcccatgtctcataccttgccctcagcctatccctgaactaaacaggacccactgagtcccagcctcagcaggctgcttgtcttcagttgatggtggattaatgacagaaggaagccccgcccctcactgctgtcaaagccttcagtaaacatgtgaatcctgaaaccctaacattctgattgcaatctctactcatccctccttccctagaggagcctttgaggagcctctttcctggggacaaaaggctctcctagacatgagtgagcaggtaatcgcccaacttggctttggggaaagtcagagtctgacagagctgagcattgtctcatccagagctaaggacatgagtcctctatttcaagtagggaaacccaggtggactttgctcaagatggttcccaaaatgagaggcaccaacttcaagaattgcctcctagggggaggcacgagccagagaccaggacctgcaggtcctttgctgctgggaactctcccattttcaggtttctagagctgtcgataaaatcctgtgaactgagagcgaggagcagtgtaggaaattgcaatgtgtggttcatgcattgtctttgatatcctagacggagctcagcttagaactttccaagcgccagtgcacagcgttctagggaatggtgctccttggctgggtgagctgccaggcaagtttaaatatgctgtgtgtgccacatttttaaattttgtcaaggtttacccacacacacaccaa

SEQ ID NO: 34924 - DNA, 1155 bp, Mus musculus
gaattgactgggccagtgaggcagctcttcagcatctggagagggtgaacccagaccagagaagggcataaccagggtggctcagctctgcctaccaatccaagtgtgaggatagacactgggagtctaaggacagaaacccggagcaagagtgcaaactctggaggccactccagaaaatgacgtaatttttccgtggggaagagaacagtctcctgctctcagctcgaaactaggaagatgcctccagaaaggccctcacagggatggcaaagcaatgtggggtgtctgggtgtaaggcgggctgggaggaagttggggtgcctgatgcaggactacaaaatataagttgaatgaaaagcaacttcctttaggagagcccagccctggttcgctttctagtgagcaccacaacttctcttggctgaaggtttgtgaaaagcaagtgttttggaagggtgggtgataaccgccacggccaaaggtacttatttcaggtcacagcttgtagtccatcatccagggaagtcatgacaggaacccaagacaggcactgactcagaatctgtggaagaatgctttttactggctgctgttcttcctggctagctcagcctgatctcttatacacccaaagaccgtgtgcccagggatggcaccgctctcagtgggctttgcccctccatatcaatcactacttacgaagggaggcattctccccacattgtagctcccccatctcagatgactctagcttgtgtcaagttaacaaaaacaacaactagggcagcaggcatgttaactctctctgcagccagaggtgttctccagaagccacagccctggctcatgtgtgcaatccttacatgagacacatccggttcacacctgcatacacatttgtgcgtccccactactccaccctctcctgcgcacagagaggctcttactgtgcaggcgggtatcatccctacagtttcctgtgcgcacacttgctccagagcgcagacttaacctcgccttggaccttcaaggcctctgaactcctgacctgttggcttctttgtgttgcagtcctcccacgagttggacgatagcagcagtgagtccagcagcctgcagctggagggccccaattccctcaaggccttggat

SEQ ID NO: 34925 - DNA, 1198 bp, Mus musculus
actccttgacaactcaaggatcttcagcctgtcagtcacttcagctggcaaccatcagcatggccacacttcgtgctttgacaccatctcaaaatggactgactgctctgactcagaccacagcctcaaatctgtcacctcctaccagctctccctttttcaatcattatctcatggagctctgctggcagaaacaaccacaggaagattccccggggccccattgactctctgctgccccctggagacatgttagagaaaagccacaaaggaaggcaaagaactaaggacttctggtcatgccctcccgttctcatttggctcctcagggacacttctctgagcttcatcctgaccctgaccctagcctgttgactataccttctgctcctggtaagaaactgaagcccttttggcggtgtgggaattgtcagcatctgctacctaattacagatttgtctgctgttggcacttcccttcatctgccacttctgcctggttggaggggaagtctgtcttcctctaagacccacacctgagtcctgctcccctgctcccctgcccccaccctgtgaggaggctcactctatctcctgctcccccgcccttgtgtcttctgattcatctacttccttcttgccagtcactgcccgctccctgcttcccccttggcctaggcttctcatcctactttctgcatctccacaccatgcctacaccctctacccatttgttggcacgagggaagctccaggcctctcagcaccgtggtcctagatagtccctagcattcctgactgggtcagcctctcccagaagtccatctctctttgcatttctgggtgcttcgttccaggtctctttgctcttgtaaaggttgtttttctggctttgattctggcttcctttcccctgtactgggtacagtctctgggttagggcagcctgctctgactagttgttgctcctgcctgctagaccagaatgccagggtgtactggcagctttgcctaaagccttgtgtgtgtactgtgcacattctctctgtccctccccctggattaccactctaccctctgcagaggtgcattgctgagggcagggcacctcttgtaactgtttctcacctgtagccaaaatttggtccttgcctttccgttgttgcctatattcttctgttagctggacattactttc

SEQ ID NO: 34926 - DNA, 1182 bp, Mus musculus
ccatttccggctggtttgctctgaaggtagggctggctggatgctgtgggggagtggggaggcacaacgaaggtgttgatgagtggattccccgtatttggcctctaactgctatcacacctctaggaaataggtaaggcaagggttgttcattttataatggctcatcctggttgtcaacttgacatgcctgtgaagagggaacttcaactaagggattgctcagtcctgtggccacgtctttgggggcattttgattgcttgattagtgtaggagggcctacccctaccccctgtggtgcagagagttgggcctgagctagctgagcaaatgcacagatggtgcaggtcaggtgggggggggggggatgggggaggtggggggtggtggcactaatcatccttcttgtggtctctgcttcacttctgcccccagtttcctgcttgagtttctgctttagtttcttccctcagtgatagtctgtaacctagatgccaaataaactcttttctccccaggtttcttttgatcatgatgtttctcccagtaacatgagaaactagggcagttcccatccttcagatggataaactgaagcccagactgaaccaacggcatctcgggagccaggaaggagcagaaattgttttctaggtcctggaatctggacatatatattcctttgcaaaatcatcctccctttggctcagatccaatcaaaagaaaagcacccagcatacccagcaagcatggaataatgaaactcaggtcttgctttgcataacggttgcttaataggtaagggtgaaagatacagatgtagttgaacaacacatctgactgcttcagggtaggtgaagcccaagcaggctttcccctttgcatagccctaggcagtgaagtccctagaaagcctctgtgtttgttgagtctagaaaggagcgctgaggtgaagccaggtcctacctctacagtgccactgaagcaaatgtcctgtaaccagggatgtgagacctggcccctcttatcaaagcgatccagggatctgatagtagtgaaacctcagggcattccttagagcagcctagccttttcctcagccaatccaagagcaaacagttctgttgaatgagtcatgtgtagcttcaggccccagaggtgaagtttccctgatcaagtca

SEQ ID NO: 34927 - DNA, 1196 bp, Mus musculus
ctttactgatcaggaaactatgatgtggaggatagtgttagcttacccaggattaagaaaataaatttcctatctggagtatgggctacagtattaagttccacacctcctgattgcccttccggctgcccctttggaaaggagtccagtggaatgaagggatagtttgacaatttccccttcaggtcctcccagctcaggctccggtcatcagcatgagaaccaggtctgagcagaagacccaccctcatctctggcccttctctatcaatccttctctgggcactcaggtttgtttatccccctagggatctgctgtggagcccagcatgatggcatttctaagggaaaggcaggaaaggcagggagcagaaagatacccgcctagtttgtgtagcaccctgtgtcaccctcagggaagaacccagaatccagaatggaccccacaagaatgttcttcacttgtctgcccaacctcttcctcttgcctagtccttttgtcatcttcaagcaggcaccccattctgttctcccaccacctccgctctccctccttatcctcaccaacaagaatccaagaacactccagtgccttagccactctgtaaagttcccaagtctagccataccgttactgacaacttcatggagcctcagctaggttaccatatgttaccaagaaaatggggtcccctctcaggattcctagtttcaattataaaagaattttggaacagactcagaaggaagctctgggacaatcctataagcacttgaaagaaaacaccaggtcaggcaggctgcctgggaaaggcaaagatgccccaatcctgagtatgacaagccttgccacacccccacacagatctcctttctccacaatctttcttcttaatgtcccattccatcagaactttcaggcctcgtacaagccagaagccctggtgtctgcttgtgtcttgtttcccatctgtcctaggactaactccacactgctgcagaagaccgagcattcctccgcactggggtgggagtgctctgtgtaacccagacagagtgctgactcagtctcgggcatggtggtggcattacacaagggccacagctgcctgggaagccacactcttgctctccctgaacccccagaggctgtatgtaggggtaggcaggccgagtgctcaagggccctgccttgc

SEQ ID NO: 34928 - DNA, 1099 bp, Mus musculus
ccacacacgcttcttaccaagaaaggatgaagccaatgttcccactctatcctaaaataggctgccaagcacacccaagaatgtgtcctgtgaccccacactagaagaccttgacactcagtatgatcgcatcacgaagcctgatctatacccaagggtgggaaccgcatcactgtggtctctacccatcatggagaccctctcactcactcactcgcccactcactcacagtgtgaccttgggaagccactgaactgatctagtctctctcccataaaatggactaatggttgcatctcccccgagagcttggcagaagggttaaaattaatatgtactgaatgctattgattatataaagttattatatgtgaaggacatgtaactgtggctgatacttgctggacacaatgtaaagatttattagataagttagtcatggcttggatgtacacaagatgaagctagaggctcagggtcctatatagcaggggctttaagtccgatgctctgactcccagtagatcctctctctgacttagggcctggctagtggaggagaggatacagtgatgtcatctcctgcccatcagtagatctgacctcagtttcttcagtggcaatggaaggtatgtaagaaaaccagccttacttgacgtgttataaaacagtaactaagttaactgagctcctaccatgtcatgtgtcaggcaggccctctgctaagtgctttactgtcacaggatcacttcatgaaacccttacaagtttagaggtgggtattctgttctatagaggatcagggaggtgaaaagaaaaacaaaaatcctgtccaacatcacaaagctaataagggatgagctagaatctgaattaaggtctgcctaaacctacaaccaaagatgatgatgtccttgaagccattgtacttaggggtgggtcaataaagagggtgctggcctgagctctacctacccactccaggtttagccaccaaacagccttccgctagatatcagcttggcccaggaactgagtgatggcaaagacagaaaagtgactgttgggatgaggggaccctggaaggaggtagcaggg

SEQ ID NO: 34929 - DNA, 2252 bp, Mus musculus
cacagccttacttttccaatggacttaattcccatcatcctgcagcctcatttctccagtgacacgatacacgaaccatcctgcggccttatttcccacggacacgacacaaagatgtccctcctcggtgttcctccagagtcgtctggtggccttgtgatacggcgtgaaccttcttccttctgccttacgtctaatggacacacacgcaccacccccacacccttgctcctccaaagccatgcagactgtgtaactgctattattctccaaggggcatcctgtgcagatgaaaccctgctttatttccctgaagacagctgcacagtgacctcttagttcttgctcccatggccctgatgtatcctagttaccagccctcaacctcagttctgagggtgggatcccatcgctcagcaaggcttcatcctgacctccctgccctgatctgatctggccctggcttttgttgtctcgctccctgactaagtgagatggggcactctcccgcccccgccccccccaggtcacagatacctacctgcagctgtgcgtgctggatcacgcacatacttgccttgcatggtctcctggctgccctgggctgtgcctgttcttccataggaagcaagttcttgtctccctggttctcagggcccctcaggggctcagccttcagccctgtgcttccccatgttgggaatctttgttacctttttcttctttgtaaattaacatctgataacaaccacagggtccaatgggactttcacagacctgccagctagataaataatgacaacagaagtttattaatattttaagacttaggccttttgctgggcagcctcccaactattctatcctgactaatcctggcactatgtcccaccacatggccaggtctacctctctgctccactctccatccacctccatgtctgccagcaaatctcccgtgattcagttcttctcccagagtccctatctctgcccagaagtaccatcttcgacttcctgcccaactattggccgtcagctcttcattaaagccgatcagatgtaattctagattgccttaggcaggtgaggaagaaacaagtatttgtaaaatatgagaccagcaatgggccatagaaataacagcaccagatcctgccagcatttagccctctgttggtacaaaattaacaattgaatatacagagacctacttccagagtgtaccccaacaacaggcgtgagcatggtgctgggtactagggtcctgctggaaaatcagagaccttacctacagctgggacatgaccttgcttccgacttacccaccacttctggatacctcaccctcagcccacactatccctggcctagggcccagggtagagccagaaacatggagaaagcatggccccttgccgtacctggagaactgggtattttccagagtctttatagatgtggactggaaggcaggtggccacagccgtgcagacctgggtcaggtcagaaacctatgccatgctgggacctactcaacagcagaagcatgaagagggcctgaggacaagaaaggccttcttaccatggtgctattctggagctgggatatatacctggcttgtctctgactgccctggcttctggcagaacttctgatgtcctcctgaaggcctctctcccaccccagtacctgagaacctgaggataatttaaacatgggactctggccagcacctgggagagacaggtagatctctgatttttgactcagcctggtctatcgagtgagttccaggacatctggggctacacagagaaaccatcttaaagactaaaaataataaacatgagactgtaaactgggtgtattttgggagaaataaatgtctttttctttcaatagcctctggcctgtgatgcctgtgaaacagtggggtggcctggtgctagaaggaaggaatctgtcctgggcacttcctcctggggaagggttacctagctctccatagcccagtgtcctccttaggttcctggctgcatttctgtcttaggaaagtaaagttggttgaccaaaatcaggttcctttgccagtgactcctctcactgatgtgcatgtcacttgatttctttttttttttttttaatttattggttattttatgtatttacatttcatatgttatctcctttcctggtttcccctctggaacctccctcttctatcatccccccccctcccccggcttca

SEQ ID NO: 34930 - DNA, 1197 bp, Mus musculus
gggggggggagccaggatgtacagctctatacatcttagatatggctatttctcttttctattcatttattgcaaaaaggattgcacatccattgtaaaacaaacaaaaacaaacaaccccctcccccaaaacccagattgtatcaagtagaagacaaatgtggacttgtcctttactcccacattctagggatgggttcacaatcaagcttctagatcctttgttcatggaaaccatctgtctgttcatgcatatgtccatccactcatccaaccacttagcaggaagcaccgaggtccctacggggcaagtcttcttcgctaggattaaggatgtaagagttaatggaagcactcgtagttgctactcagggaggctctgaggtgtcaggtaaggcacactgaacagcaagtggcagactttgttctttctgaccttactgttcaggagaaagcggttttaccatgccttctcagcatgagcgactataatggtaaaaaccatcccttctgagataggaaggaggatcttgtgctgtagaagctggaagcagctcactgcattgaggggcaagtgcaaggaaggagaggaggggaagtgggcagagtcaggtcagatcgggcttccttggagctgagctgttattcaaatggatgagcaggtctgtggtcccccctggaagggtgtgattggatgcagtgcatgctttatgagtgtgtgtctgtgtgtgtgagtgtgtatctatgtatgtgagtgtgttcatacaggggcaagcttgtctatggctctgtgtgtgtgtgtgtgtgtgtgtgtaaatagaagccagaagtcaaacaccctgcttttctgtaggacagtggttctcaaccctcccaatgctgcgagcctttaatacagtttctcatgttgtggtgaccctcgaccataaaatgattttcattgctacttcgttactgcaatgtgccactgttaggagtcataatgtagatatctgatgtgtgaccccccccatgaggtcgtgacccacgggttgagaaccgctggtgtgggtgctggggctctaagctcagatcctgtttgatatgctttgataaagtggcagtcactttatccaccaccgagccatctccccagcccctgcatcagttcctttagattgctgataactgacgacttgattgctaacagcccagacc

SEQ ID NO: 34931 - DNA, 1177 bp, Mus musculus
gagggcctcttctcgcgagccttgccgccggtgctcctggcccgcccacggccgccagcggaggtctcgcgaggcttggacgctgcggcggtaggaggaggacagggaaggacggagctcggccgcggctgcctccctcgttcactccctcgcgcgcgcgctcgcccgccccctccctccctcccctccctttccccggccccggccccggcccattcgctgcgcgctctccggctagggaggatgtcgggctcgtcgctccccggcgccctggccctctcgctcttgctggtctctggctcgctccttccagggccaggcgctgctcagaacggtaagccgaggggccgggggcgggtcgggcgggggcgcccggctctggcaaccagaggggccgggcccaggcctgagggggatgccggagccggcagcgggcgacccggctgaggcgaggaggtgcttcgcggagaggtggaggcgtcgctttggtgcgagcccggggctctgtagacaggtccgcggcgtagggctcatcgcgcaccgggagctggagtagcgggggcggctctggagaaagcggcgggagacaggcgttcgagttcgagctggcggaggggtggtgtcggcgagagaaccgggctccgcgggcgctgacacccgggattctactggggccctggaacccgggtgacattctgcaaaatgggaggaggggggaagctggggtcaaaaggatcccgtagaatacctagaggcagcagactgcttgagtctctcaaggagaggggttagtgagcgattcgggaaaccttggatttgggggtagagggaaggtgggtggaaagatggagtgggttgactgcagtagggggacctggagaagagaagcagcagtgtctccaaacgagctgggggaagaggattgggttttgccaaggagggtggagtgctgggcattctagggtagcggttgggaaagcaaaagggagtttctaaataaggagaggaaaatgagcagaggatgcggggaaagctttaaaaccgaggtagaagaaatatcagggaagtaaagggtgcctgggtatagtggtgggagtgggggaagacggaaaaataagggaagagagtaaaatgcaggaagtcgggggtgtaatgttgctttgtagcgcggcggata

SEQ ID NO: 34932 - DNA, 1199 bp, Mus musculus
acaggaatgttgccggacatggtggcgcatgcctttaatcccaccacttgggaggcagaggcaggcggatttctgaggccagcctggtctatagagtgagttccaggacagctagggctacacagagaaaccctgtctcgaaaaaacaaaaaaaaacaaaacaaaccaggaatgtttgggcattgagatttcactatattttctattttctaatgggtttttaatggtttctttttgatatttttctaacatcttttaattctcacagggtcataatgttcatatttctcagaaacagctcagctagtcttcgaggcctaggcacaaagaacattaattcctgatggaactaagaatatcaaggcagagctgggcaggggtggcgtttaatggtttctttttgatatttttctaacatgtttttataatcttttaattttcacagggtcataatgttcatatttctcagaaacagctcagctagtcttcgaggcctaggcacaaagaacaattcctgatggaactaagaatatcaaggcagagctgggcaggggtggcgcacgcctttgatcccagtacctgggaggcagaggcaggcggatttctgagtctaaagagtgagttccaagagagccagggctacacagagaaaccctgtctcaaaaaacaaaacaaaacaaaacaaaaaagaatatcaaggtagaaagaattccagataggtcgctagaagtaaatattgattatgagctatgaggtactaatatgagctttgggctggtcaattttagagttttcctgtaacgttattctatactgtgcctgtgaactgtctgccatgtagcacatagtttgttgtggcaggtagatagaaaaattcaattatgggatgggggtgatattagggagcaatccagttttacagctgtaagaagaaaagagcgaattcttaaatttgcattagagtggtgcttgtgcaaataatcagagctaagagttctttagcatttgtatttcagtagcaaatacgtgtattttagcatttttcaaagcctagtggaagagtgtatggaatgtgttttagtggtagtgaggtgtcacttacccttctgtaacataatatctgtttgtcattgaaagagctcaagaattgtatcaagtcttaaactcttgaaataataccactggaaaacttgacaggc

SEQ ID NO: 34933 - DNA, 1061 bp, Mus musculus
caaataaaaatcggttggtcagccagccatgagtgccctttgcctatcactgtctagactagaggatgtgctccaagctcagtgcagaaggcctagggcaatggtggtggtggtgctactatctgtgctgtgctagggtccttccccagagttgatggttccatatcaccaagcagtaggactacagtgtattacctctctccacaacatatcacacttctcagtggacagcactaagtgaagttttgtcctcccttggaaagagaaatcctcaaaggcatagcatggcattagactctgacaggacatatttgagagcaacacccacttttctttcttttcctttcttctcagcagctcttaaatctcttgcctggagtcagtagagtcttagagtgagtactgacacgggggaggcgggctcctgacattgatctctgcgggaagacttggtgggctcccttccgatgtacttttcatcagtgaactggatgggaagatgggggacgtgagctggaagcagagaggcctttgtccagctccttgcaacaaacgatgtccccagttttgctttctcatactacgaagtaaaagtttgttcttggggttctcatgtgttcctgatgcctttccttcacacttttcttttttcctgttaaatgttcccaaggtagaacacttagacatactcagacctgagattaaagggagaagaggagagtgttgccttcattctgtatggttacaacttggatatttgggaacagttacatttctggaccattatcccctcagaataaacctttaaacagtttaaaccttgccagttaggagcctagagacttagatttgggtcagtgttagagcacaagaccttgagtttgttcctggaaagggaaaaaaaaataccccaaagaccagagagagaaagagagagactgagaaagataaaatgctagctgtgccaaatactatgttcaacttttataagccaaggagccaaaaagtcagctaagaaaagacagatgggtttcaaagcctgatttttaagacagagatgg

SEQ ID NO: 34934 - DNA, 1835 bp, Mus musculus
acatatttactatactaggttcatttcatattaaattccttgtattgcagtctacttacatattttttagaaggagttaaaaaaaatagttaacttcttaggcagattatacccaaaagcctgttagtactttgtgtgatctctgctgaaggcaagatagaaatgtggccataagggaacagggccagaatgcttagaggcacatggagatcagagtttcataccacatccctgagcatgctgtttgaaccaaagctgtgtctgatgtggcactgacatagttgtgatggagtgacagtgtatattcttttaatttccagatatccttctctttacagctctttaggttcctgaaaaacgatggcaacatgacctgctaagttttctgcttggacctctttggtctctctccctttcaagtgagcaacaccacaatgaccgtctaaagcatgccttatttagcctctcctataagggtgacctagccaggtacattttaaacaatgcttcagtgtagaaggtgtaaactattttgggcttgatgtgctgtgaatgttgctttccctccctttgttaaaaatatttaaatagaaatgaaaaggtcctctgaggatcagatcatgcatgcgccattttttacttatgcagctgttaaattggcaaagctctaaacgcactgctgccatctagtgatcattttgtaaagtacagcaaaacctacagatatatacagtatataaatatatatatatatttatatttttgggggtgggagaaatccaaaataaagtcaacgcttgtttcattttaagctgctgatactcattccttattatttgtcgtcagatgaggaagctgcagttctggtacaaactgatgagagtgtatagacttaagtctggcattctaagggcttaccgtataactttaggaacctggaacagtccactgaacggctagaatgaattgcagtatatatgtatgattgattgctttttaagtgactatttttcctcttgtcaaatcatgtaaattctgaaatcttttgcactgatgtgtcaaaccttattcttgtatattcaatcaaggcaacttttataatttcccatttgttttcaatgaccctgaaatgttaatagcatggtgatattctatgcaactctagttacaccttttggtttgacactgtattttcacattgatttcatgactgatgatagattttataacctgactgggttctcatgcggtactaactgtagatgcatgtacttgtgttctgtgtaattattgaagtgcaatggtgtacaaaaaaagtggattcacctgtttttaacaataaaacattgataaaaggtgcttggaataatactctttattcaaataccttcagttccttagttgcatacatgtgcagggctttagtttctcaaccctgtaatctttttaagttccttttccacctcttccacaaatgctgggaagttttgatccatgagacataagcgtagaaaaggtcccaattcttctgttccccatgaagagccttcataggcgagggtcagcttctctggcgccaggatagactgcaggggtgccaaaagaccagaggggttgactgcctgatcccagataatttaacacagaaaacattgccttaaaatttagaacaacataaaatgttactgtctttagaaaaatccttttctatacttaggtttcacgtttacaattctgtgcctacaatttctttccttcctctatcccactcttgagtgctatattcttcccctccttccttctcccttcctcattctgtcactgccctgaacccc

SEQ ID NO: 34935 - DNA, 1185 bp, Mus musculus
gatctcaacttcagatacatcaatgtttccttaaagatccaagtttatctcactttctatgtatgtccagaaaatgtagagctgggcccagtgagtagtatctgtctataatccagacatttgggatgcagaaacaggaccgtggatttgagattaacctgtgtttttggtttgggtgtttttggttttttttaattggggttcagggcagtgacagaatgaggaagggagaaggaaggaggggaagaatatagcactcaagagtgggatagaggaaggaaagaaattgtaggcacagaattgtaaacgtgaaacctaagtatagaaaaggatttttctaaagacagtaacattttatgttgttctaaattttaaggcaatgttttctgtgttaaattatctgggatcaggcagtcaacccctctggtcttttggcacccctgcagtctatcctggcgccagagaagctgaccctcgcctatgaaggctcttcatggggaacagaagaattgggaccttttctacgcttatgtctcatggatcaaaacttcccagcatttgtggaagaggtggaaaaggaacttaaaaagattacagggttgagaaactaaagccctgcacatgtatgcaactaaggaactgaaggtatttgaataaagagtattattccaagcaccttttatcaatgttttattgttaaaaacaggtgaatccactttttttgtacaccattgcacttcaataattacacagaacacaagtacatgcatctacagttagtaccgcatgagaacccagtcaggttataaaatctatcatcagtcatgaaatcaatgtgaaaatacagtgtcaaaccaaaaggtgtaactagagttgcatagaatatcaccatgctattaacatttcagggtcattgaaaacaaatgggaaattataaaagttgccttgattgaatatacaagaataaggtttgacacatcagtgcaaaagatttcagaatttacatgatttgacaagaggaaaaatagtcacttaaaaagcaatcaatcatacatatatactgcaattcattctagccgttcagtggactgttccaggttcctaaagttatacggtaagcccttagaatgccagacttaagtctatacactctcatcagtttgtaccagaactgcagcttcctca

SEQ ID NO: 34936 - DNA, 1107 bp, Mus musculus
aataccacccccaacactaaacagcagctgagggtggccacacttctgagtcttgtgggctcttggacaaggtggttcagcttagcagtagagggaagctttgggtacacactaagactttattcttgctgctactgcttctggacatctgtgaccacaagagaggtcctaagaactaccacccttcttcctgtctcctcctcccactcccgagctcctgcctggccctctcctatagtggtgtggcttgtctcaagagctcttgggttgagaaacacctggtgaggccacaattaacaaaattacaaggctaggggaaagtaaaacctaaaacacaagccaagaaatgactcaggaactttaattattcctatctgcaaagaagggaacaactaggtaaatgctgcaccttagtgctgcacgatggcctgagcttggccatgcctcaacttttaaggtagactaagaaagcaggcgtcagctttatggctcagaagtcatgggttgacttgagacatgtctgctctaaggcaggcttgctatatggaaactgtgcttgtactcaatggcttgacctgctaccctgccaattcagtaagtctttagttccttctgtgctctggagggtctgatttgatcactggcagaagggcagagctgagaagatggctgtgctggctgcagtggttgtgacaacagtgtggtttctgtttgttttccaggctcagtgttcttccccagtacttctcgttcaccacttcacagtggaggctcatggcttgcacgagatcacacagctaccataaaaacaggctaggactctaacctagatctgttcaaataccagagcttgtgacctttgcataatatcaggctgctcacctatccagaacacaagttacagatgagaagagtccctgaaaacagacttagtccttttaaggtgtttctatctagacagtctggcaccagcctttagagtcagcataccagagcctttgtcttctgttgttgctccaggcccagtctgcatgtgttcccacatagtccaactgtacttgccttatctgttaataggcacataggcaggcaacagagactgaaccg

SEQ ID NO: 34937 - DNA, 2346 bp, Mus musculus
agtcatcaacagtgaggttgtttgacaccactgacaggcattggcttgttgtgggtttcatttttattcttaattctgagacattgcatcctctgccagctgttaatccatcactttgaggggaggacatgttgcattgctgtttgtaagcttttttattatttttttattataattattaaaggcctgactttctcctctcatcactgtgagattacagatctatttgaatgaaatgtaacattgaaaagacttgtttgttgctttctgtgcagattcagtattggggtgggattggggattgggaataggaaatggaggggctgctgaggccctgtgaatgtttctgtcaatgtactttgttccagaagcctgccgagaatgaaagcagcatctttagtgtcctttcctggcatttccatcttcgtgtcactgcatagcaactggagttttgtttggatctggttataaattcttgtacagtggatgactttggtgatttagctgccctggtatcttggtcatttcctctttggagtgtccacactgaggtctctatcaatgtatgtttaattgcttgagagatgccaagtagaaccagagcctgactgtgctctgagaagctacaaagcacagggtggagactccctttgtgttgctagtattggttctctctggaaggttaaaatctaaggcaggatcttggtttcctattccaaataggatgcctgcttctctgggcaccagtcctcagccaggcagctctcgtggcattgcagaggctctcctgaaaaacatcaaccagggtgagagccaagatggggtggcacccatgacgcttccccacatgtttcttcaaggagcagaggacagagatagtggaaagagggtcagcagaagcaggtgccttcatctatcccagcagctcagccaaaccccagttagaatgaggcagcaggagattccaggtgtgctgagggttcagccacacgcagaagacgttgcagagtgttaaagaggtaagctgaggtgtgtatttggttggctttgttgttgttgttaatgtataatgaaaagtataagactaaccctcaggcctcatgttctccaatagatccctggaagacagtatagaaagtcagtcgggcttgggctccttagccagtgagactactcagaccaccagtggctagcctagcctacctgtccttgaacatgggtgattttacccctttgaggtcttaaccctttttttactttcaacaagatgagctctttgtatgattgcgggcgggggatatgaaaatgcaatgatctaactcctgttgctcttctagctggtcacatgacggcaccaggcagggttctgggacacccggtgtgctttgactgttctacaaaaagctgtcagagcgttctggcctcctggaggctagattcctcagaaactgtctagcctttgcccacagagcatgctatgtaattagagcactccttcccatgaaccccagcacttgtgttacctcagggccttggtacctggatactgccacagaatttccatggggcgggaagggatgtatttttaaataaagtaacttaaaagttggggaaattttttaaattcagaaaatgcaaagctattctgtattacaccatttcacaatttaatatgtcttatattttcctgtgactctggaaactaaaccattgtgtgtcttgtcgtgtcctagttgagctggggcctagcagcttccttccagtgggtgtggagcaaacgtgtatgtcgcctcgctacctgcttgaggggtccgaagggctgctgggactgagttctgtacacacttgtttggccttttctgtagttgatgctgtaaaactctatggctttttaaaaacaatttcatgtttttattttgtattggaagtccaatacacttttttaatccaatcaaactggtctggtcaaaaagttctttcccttaaaagttcaggggctcctacttccagcttccgatgacttctctgtggctctcactgctataaagcaggatttagaatggcaatctgggcagaggtaataaaagaaatgtctgactgccagccccaaagatgtgtcttcttcctgtccatatcccactgttacctctaggggaaggaaggagggggtggggaagcccaaggagtggcaaatggcgcctagcacagaaccaccctgagttgcacagcatcgtgctgaggtggctctcctatgctggagaggctgagctccactgttaagatctttcggtttcccatgcctagaatagtgatgacctctgcagccacaggcccccttccatctct

SEQ ID NO: 34938 - DNA, 1170 bp, Mus musculus
gtaaaaccatggaggtcaaacactggcggagggacggattaagagacaacagcgtggctcgttgtcaatgggagaccgactactctaatcgcgaggtttgctgcttcttcgttatctgcatgtcttatcttactagggaagtaaaagtattctctcgcccccaccccggacacacacacactctatctcaggctatcagtgaatatcgggaagacgtgtacggattgggaaccacactactgcctttgttcatccaaggacagaatcgcacaacagcgtcgcccagcgccagcgccaagacttaaacagagcgaacccccaacgccagccctgtcgtcgtcccgcctccagcccacccatagctccacccataactggggctgcagttccgtcgtagctccgcccatcgggaggaagagcctgtggcgcgcgggtgtgacgttacgcacgtctacgtcagcacgcgcccagctgggaggaggcgcgagccgagaaaggatcctgtagccaccggtgcggcggtgtgtgcacatggcgctgtggcgcggctctgcgtgcgccggcttcctggcgctggccgtgggctgcgtgttcctgctggagccggagctgccgggcacggcgctgcgctcgctctggagctccctgaggctgggacccgcgccagtgcccgtgggacctctgtccccggagagccggctggcagccgcttgggacgccctcatcgcgcagcccgcccggcgctggcgccgcgtggctgtggggtgagtgcctgcggggcctgcctgcggctctgggcctccccgggaagtgcgcgcgctccggggtccgcccgggactcggtggtgtctgggttgccctctgggcgaaagtgtcggacgcgtgagacgagcctttttccgtcatcgctgcagggatagtcagcatatttccacccggttggccctgctccctgtaaaagcagctctcatagcttcttagaaattcaactcagcctgtcacttgtaatttttgaggttactctgttgtctgtcttccagcccttttttgccgactgttctcaggtggccacgatggttttcctatttttttagcactcttcctaacgtacttaaagctaaatgcttctgtctctagctgttgactttacgtcatccggtctgaagacca

SEQ ID NO: 34939 - DNA, 1147 bp, Mus musculus
ctctggtagagagaaatttgtaggactccggtaaaagggcgggaagaagcaaaccattggcagtggtactggagggtaggcaggcagggcagttaagggaagcaggccctccatgtgaggaggagcaactttatgaagcaggtggttccacgtattaccagcaccacagatgttaagtgtctcagaaatattggttccctgtggtcacacagccatggtgttggaagtacaacgtaagactggtctttcccacttctgcattcacgttcagcccccagaattaccatagtttagggacagagagcagatggtaaaggcagttactctagctagacttgagtggatggaactacatgttcttgtgggatttcagatgaaatggcttccgagaatgaggctggagttaggatcaggctagatgtttttgagatgtcagtgcttcagtggaccacaccttggctttctaggagtgtaactcctccctgcttctgaattggagcctggtacctattgcttcttataggataaaatgaagccctcacattcacaacgattctgtttgccctgagcattgttctcttcctccgagttctccactctagatcaccattcatgttgtgtcctaagacaaggttctttcacccacggttttgctttctgtgccccatgcccagaatttagtatcagatgaatctacctttgaattaagctgctccagtcaggcttttggaacgttagtctgtactgtagcttttctcagctggagccatgatgactagttactaattactgatctcaattagttttctgactttgtgttccttatctgaagatgtcttcccaacttcagtgcctcagaaagaggcaccatccagggcatagcttccccagcccttgagtctcttccgccggacatcttgtaattacgattagttcttgtcatatgtgaggaagagaaagtgctaatgctagaaggaaccttagggaacattttgcaggggatgcaatggggtaagtgatgagaaagtgttctcttctttgaggtgcttcaggttaggaggaagaactctgcttccatccaagtctgcagtagaccagtaagctaggggcttccagtgctttttctgaccccgcaggaagatgcttg

SEQ ID NO: 34940 - DNA, 1272 bp, Mus musculus
cacgttgtgtgaggaatgaaagtcacccatcttaagaattccagcaagaacatagcttgggaactaggcttgtgagtgtcagaacagttcctagatcaaattggaatagagccaaagaaatcacagcagattaaactgtacagatacattccagcctgttggcaacataaaaacacttcaggtataattgaaactcagctgtctactaatgagactggatttttgttttttatgttgtgctacaaaggttaaaacctctttctgaatccccagttgatgtaccatgactctggagagctcatccagccacagaaagtactcccccccccccccccaagcctggtcactcatgaaacctggccaaggcagtcatgacagcttatgctcctggcagaatcaacttgtccattcagtgttacagtgacaatatttgctgtgtgtaccttctcagcctcctgctctcagacataggtcagagccacaggagagaacaaaacagtcttgtgctttatggtctcagactggaaacccctgggagagctatgagccacctgaccattctgcacttgcttggaagcaccatgccttcctgccccggcgtcatggactggggctggctgagaaaaggccccacagcttgttctcagcctcagcgctgagctccggcagtgctttctgcagcacaagactgctactcgttccttttgagccttgaagagatgtgttttataactggaaagtgcttctatatagaacacatcatgtattttgtgtttttgttttgacacatccattaaagagtttgacctcttaaaagccccaggatcatgaataaatgcgtcatgtatatttattttttaataaatcaagatttctgtgtgcttttaaaaatattaaaataatttacatttccaggatcctaagtctaattgattttgttctcaacccctctcccacttgcatgtcacttggctgctgagacatctgttctttggtccctgccattgggctaggcattccctcgagctaggctgtcaagcttaaggtctaccttgaagttagagcacagccatttcaaagagccaaaatctttctagtccaaagtacaagatgtctgcccaggacaagggccaggcacaccagccttggcagctgctcttggaatggcagatccctgatttgggtaagaaggaaagtcttacactttcaaagaaaactgatgcctatagagttacgcgtcttgaaagtgaaagcaaaactcattattatgga

SEQ ID NO: 34941 - DNA, 1908 bp, Mus musculus
acttttccttttagaaaggttgttacatgagatgtacttgcaactgttcttttcccatcagaaatcagtgaatgtttgctgagtatattatgctgcttcctcaaaccacttgtcgctttaggatcaacttgtatctttttcttccctttccttgtcacctcaggtggcaaatctgaagtcaagtgtctgcttttccattttctctatcccctatcattctcccattatccatttgactttattttaaataattgcatcaatcttaagacctttatcaacaccaaggagatttcaaagaaagctcaagtaagttccttttcctggtgactttgaaaagcgaccagaattgtcacatagatatatgtggtcccttaaaatgctttgtgtatgtggtgtttaaaaagagttgacttcacagtatctaggtctgagtgtcataagttctcttcatgctctgccctgcaacaagcgtccaaaaaagagtgtgcatctcatagtctcagtccccaccacggagggatagtgtagttggtgacactttctagtcccacatgggacctgaggatattgcactcacaatttgtgtggatcaaggggaactggctcttctgctacatccaagtttttaacaaccgtctccatatctgacagcatttccagaatttacctgcctttgtcagtagctagcttcagtgctcccagctgggacaggcaagccatattgttaacagcttccctatttgacctacccaagtctctcagagggctctacttaaacatcagggtctccctgtgttgttgagatcagttacattgtcagtgcatgcttcatttgagcaattcattgagcaacaggtgaattttcaatgatttacaataaaattttgatccaaagctcaggagacataccatagtggtaaatggagtagcatataacattaccagactctaaattctttgtaatttgctgcaacccagattgtatatgttttatgtgtgttcaaataaatatattaaagacacacgtgtatacatacacacaaatagatccaagactgacttgatttgaaatggttgaatctgcagtgtaatgtgtggttcacctgttaagtaggacttgaaatttagaacaagaagagtaaaaggcttaaatgtaacaaattcttttagctatgtccggtatagagcacttgggggatgggatggggtgggttggtgagacaatcagatcgataaattgattaaatgctcctaaccctgtaattttgtgcatagagcaccttgtgctgtggaaataactgttcttagattttcattgtaactggactgttcaggttgcccagagggaaagaacattcctaattctaataaaataaacttttattttgttattccattagttacttatgtttatttttatagttgaaaaccgataacttaggtgggtaactgccacctgtataatgtgccttattcactgttcctatttaatataaactgtcaagatttggttcaagttctatgtaaggaactgtgaatgagaccattcccaacatttagtttggctaattgaaacttttcagaagtatttctgaaagctttctggtttctgcctcttgaacattgactttaaattgttgtttgtgttttagtagtgatacacacttagatgttctgtacatcttggaatgtcagttttttatagatgagatatttaaaacattctagcctcaaaaggaatcagctttcacataaaagctgatagtccctatttatggatagtaacgtggtactatcaaaccagacctgacttttatcacatctatactctagtttgtcactttcttttttaaaaaaaaaaaaaagtggagtaaagattgctgtttgacggaatagggaaataagatt

SEQ ID NO: 34942 - DNA, 1281 bp, Mus musculus
gtatgccactgccacaaccaccacctggccccaggtattatagtagtaaggaaactgggacgttggaaggcctagagatttaatcccagtgtcttcacttcctttggctaactgtaatttttacattgtattaaaatgcttgtacagttaaccaacactttattttatagatgggaataaatgacctataaaattaactgaataatttttacaactatgggtttgaatcattgttttaaaggcacattagaatttctaacacttgaagactctaaaatttatttctggcactgggaatctgactctaagaacaaaaatcttggaaggaaggatagatcattggtaggctgtctaccatgtacatggtcctgggtttggttttcatccagcagccaaagaatgcaaaaaaagagtccttagaacatgtagtagaggcatcttgataaacctgtgcatctacgtctgaaaatgtttatagcaattattagcaggtgctttcttcaaaccctggacaaactctaggaatggtcctttgtaaaaatcaatacctctttccctttcagagtctgacaagttttttttctctctttgattacagatactgtgagagtcgacgaagggttttgttacagcatgtgcatgaaggctatgaaaaagatctgtgggagtacattgaggactgagactggccctgcataaaatgaactctgaaaactttaccatctagagtgctcatgcaattaaaacaaacacaaacaaggaggcactaagcctgttctgacaccgctggtctgtagtaccagaattctgttttgttaacggaaagtttaagtaaattatattgtaataaaaaaggtagataaaccattgtacaacagtattctaggccgccaacaaagtgtgacagacacacaaaagccctccaactttaacttgtaacgtagcttcattctcaacgctgacttcctttttctttttcctgagtgtagtacagttaaaatttcaatagctccttgacactgcttttcatgtccaaaccagccattttgttgtactttggtaaaggacctcttccccttcctcccctgcacatacacacctccacacacagttggattcactttctctcataccctcaggtcatgagtgaataatgattattagctacttgtaaaggaaattctttggagggagaaggggataggcagcaagaggattaaaaaacaaaaaacacaaaaactttgtatatgacttttaaaacaagaggacaacacagtattt

SEQ ID NO: 34943 - DNA, 1190 bp, Mus musculus
aaaactattacattttttagtctattaatacccagtaataaccaggtggtgatagtgcacacctttaatcccagcacaagggagccagagccaggtggatctttgtaagttcaaggccagcctgtctacagattgagtagaactgttaacacagagaaatcttgtcttgaaaaacacaaacaagccgggtgtggtggcgcacgcctttaatcccagcactcgggaggcagaggcaggtggatttctgagttcgaggccagcctggtctacaaagtgagttccaggacagccagggtatacagagaaaccctgtcttgaaaaaccaaaaaataccaaaaagaaaaagaaaaaggaaaaaaagaaaaacacaaattaaaaaaaaaaaaagcaaacaagactaacgaaagagccagtaataatatactttacatttaatgatctttaatagattcctactactttttaaaataacttatgtgtataaactcaaatcaatgaagtctagaactagcttctgtcctcaatggtatagcattgacaccaactctatagtttttttccataggaatgtcccaaatgccatgtcacaattgagaaggatggcggttgtaatcacatggtctgtcgtaaccagaactgtaaagcagaattttgctgggtgtgtcttggcccttgggaaccgcatggatctgcctggtaggttggacaaatgggagagtacattcatgtaattataggatgtctaccatgtacaaatggtatttctgcctttgataattgcctgacgagctaaaaaagattaatatgtcgtttcaacattatatgcaagataaccacagagaggtattttgtagtcctatttctcacaggaattaataattgagattaaacctatgcattgagatttcattagttgaaaaatttggaaacagtaaaaggaatactgtgaacggaggtgaagtagtgttttcagctcatgatttaaatttttagttacattgtctggtaagtcgtctagtagagtttaatggcagaaatttacttgtgtgttttccttatgcttcacatcattagacgacagttttgtcgtcttaactaaaaagtggaaagctactgaacaaagatctgtatttttagcttctctttgaagtaggcttgccttcctattgggaataattacctagaactgg

SEQ ID NO: 34944 - DNA, 1099 bp, Mus musculus
taattatttaaactcttggtgttcttttcagctttaactgtggtgaaaattggcatgatccagttaaatgtaaggtgaggttggtttttgtttttaaggggatgatatatttctaagattcaattaaagataatagctgttgatttgttctgactaacaaaagattttgttcttttcaagcgtcattgcaggtagtctataagtgcagtccttaggatcaggctcccatttgttcttagaacatccatgaataggttttaggttaatttgacttttcctcaaggttcccaattccccactcaactttaaccaggcaaaattattgtttggttactcatatataaatgagattttatagctacaaattttcctacgttgagactatatctattgaaaatcagttgctttttaagtcttatatttaaagcttgcctttaagtgctgaaataaatggctatccttaagcctagttatattctaacagttgttattttcaaatagtggttgaagaagtggattaaaaagtgtgatgatgacagtgaaacttctaattggattgcagctaacacaaaggttggtccatctgtgtgtctcccctgaccccacccacaccccaactgttgataatgaacacatggatatgggtaagtgtataagcattagcgaaagcagtgtgagttcatgttggtatgggccttgtggtaatttttatccatgccctcccacccacaatggatgcctgtttattccctttcaggtgtttatttggaccagctgtaaggcagtgtggctcctttagtgtaaaaacaatgagttctcctgtacaagttaaatttctaatcttgactgctttgctgcccaagtatgaggatctgagttcagatcttcaacacccatgtaaaagaggtgtggccatgtgcacctgtaacctttagtgctgaaattcagagatgggtggattccctcaaggtcagtggttaccagcctagctgaatttgaggaaccccaggttcagtgagtgtgtcttaagaggaacaagactgagcgatgaagcagggcacccagcatcatcttctagtctcttgtacattcctgtaca

SEQ ID NO: 34945 - DNA, 1202 bp, Mus musculus
aaaaaacaaaaatatctactggaaaaagcctgttgcatatttgttcttactgatttttgtgtctcagtggcagccactacagagaaccctatatataggttataaaacaaaattattttttttctcgggttttttttgaaagtgccagtgctcactatagtaacgtcagtatagcttggtgttttcagtcttgagaatagtctttgtctgtgttcgagattaaacaataaaagtgcaagttaatgtaccttttgatcagtgtactttaattgttgtctgtacattggaatctaggactctcacatctacatgttatgcaagtgacctcctaatgagttacatgcccatccagtaatttatttttgaagcctagtacagaatgttgcttaaggcatgtcttgttcatgtaataaacatacgtcatagtttgtgttttgcctggttggggtggaatacacctggaaatcccagcactaaagtggctaggtcgaagagaatcacaagtttgagggagctctggtctacctagtgagacaccttgtcttaaaacagagagacagagacataaaacaaaattaaatactgtttaagtgtctgtggggtttgtaggtagaatgaaagatatagttcttacattttatagaattaaaagttgaaagatgggctgggcatagtggcgcacgcctttaatcccagcactcgggaggcagagacaggcagatttctgagtttgaggccagcctggtctatagagtgagtttcaggacagccaggactacacagagaaaccctgtctcgaaaaagccaaaaaaaaaaaaaaagttggaagataagtaattttgtgagggtctgggaatgcagctttgtggtagaaggcttccccatcagataagagattggatccctaaaaccaaagtaaacaaataatgaaaccacaaacttaacaacactgtagagttggggatgttactcagttggtaaagcacttgcctaaggtgtggtccttgattttgttcccagaattcaactgaataaattgtaagaattgctttacattgaataaacttcaatgtcatctaccatatttctaacaaaataaaatagaaataccatctatctccccagatgctgataaagttaacactcatttctgactaaaagatgataattatgagaaaatattgcatataatatgtattata

SEQ ID NO: 34946 - DNA, 1192 bp, Mus musculus
aaatctttttttttttaaaggaggaccaaatcacctccagcataaagtgagctgaatagcataaaatttgtatgtaactttttcctctgaagatgatggcctactaagagaggttctaataaggcttggaatgttgagtgctacttgtgcaagctcctgagtctaatcaggaagttggcaggaagaagggggggtgtctattttcattctcaattacacatgctacgtcagtccttaagctgccattaagctacaacttagtttctaactacttaataacaaaatttcacagtatctataccaacttttcacaaattcattttaaaaccaatatccttgccataacatcaggtaatatagaattcaataattaaaatcactgagaaatggttcattggctaaaagtacttgctgctcttgcagaggatctgggtttagttcccagcatctatatggtgactcacacccaagtacagctctagttccagagaatccaatgctctcttacgatctccgtgggcttctgcacacacctggcacacatacaccaacacaggcatgcacatataaaggtaaatatatgtacatatgtaggtgtacatatgtatgcatattatctcattaggactggttgagctttagcactattctttctgaggtcaggctgggttttgtccctagcactcataatccagtcagtcctagaggatttgatactcttttctggcctttgaaggttcccaagctatgcagtttgcatatactcacagtctcatgtaagtatataaactaaaaaaaaaatttcaaaaaagattcatggcaaaggaacacatagcatatagccactatatatttttagggtgttttttaaaaactcaccaaatttgattcaattcataactgtttttggattattttagttaatacatgcatggaattttataactaataatactgtaatgtctaaatcttttttaaaaatttaatacattacaaaaaattgtgtatgtgtttggcttgaacaacctgaaggagtcagctcttttttccctgtgatcctagggaccaaacttaaatttgttaggctttggcagtaggtgctgccaaactaagtagtacctgctgaactatcttgctggactaaggtttaaatctttgtcttacttcggtcaccactagagttttttatttg

SEQ ID NO: 34947 - DNA, 1234 bp, Mus musculus
aagcaagaaagtggctcaagtgagccagctcctgcttcggaagttactcctaagggtgtcttggccccagagtcttcctgcctgggctgctcctaggaaaaatttaatttatgcagagactttcactagtaaaattatgggcagatggggctggagagatacgactcaacaattaagagaactggttgctcttccagaaatcctaggttcaattcctagcaccaacctggcagataataaatatctgtaatagtagccctttgggatctgataccttttggtgtgcagatacacatacacagataaaacatccatatacataaaacagataagccttaaaattatgtatgtatgcatgtgtgtgtatgtatgtatgtgtttgtgtatataagggaagaggccatgcatattgatagacatctgtaaacccaacacttaggaaaccacaagaggatctaaaatttaatgccagcctgaggcataagtgattcaggcttctgccttctgcctcccacccccctcccctgctccccccctcccaacaaaagcaaaagtgtttcccagacattgctgtaggttttttataccttaaagtagatactgaggagtttgacccctagggtagaatttgtatgaaagaagatgggggattgggggtggcacacacctttatcccagcatcaggcaaatcactgagttcaaggccagcctggtctagagtgagttccatgatacccagggctacacagtgaaatcctctctgaaaaaaacaaaacaaacaaagcaaaataaaaaacaaagaagaagttgaagctagtctttggagatcaccattgcatgatcatttttgctgctcagtcacttgcttctgtatccaggaaccccgagtgaaccctagatgacacctttgggaagactggaataggctgcctcctggcccagacacagccctcggggaatgtggaaatgggcagcaggcgctagagtggaggggctgtcagtgggtgctgacacgctgtctccttagccctgaggggctgggtggtttatgctggaaaatgtgtgtggggtaagatcgtacacatcggcattcattgccagtagcccagcctcagtctctgatggtagatatatctgtatttacttaattgtgactaaacaggttgttactgatgcttgtgagtacccagcactgcacgtgtggatgaacagtcatctactctatctagggcct

SEQ ID NO: 34948 - DNA, 1193 bp, Mus musculus
accccagcttcccgttccgctcagcctcagagggtgtactggggcgggcgccgggagggtggagagtctccgggcggggctggaggaatgtccgtggacctataaatctgggcaccgccctggtaggccagggcagatggggagacctgggcaaaaggccaaaaagggaacattttgtagccgatctaaagcaacaggtggcggtggcgcccgggaacctaggggtggtggtggcggcggcggcgctggcccggtgggcgggccttgctccctcaccacttccccattggtcaacaggataacccttgagcaaatttggtctacgatgtccttccgccacggaaggtagtcctcctcaaaagggcaacctgcttgtcccgcctaccctgagcttctctcaggaggtgcgggcgccccgttgagaggcggggcgccgccggccgcagcccggattgggcgaggggcggggctgcggagggattgcggcggcccgcagctgtgataaccttgaggcccagtcggcgcagccccgcacagcagcgactcgtcttcacttgactgacgtccgctctaggtatcgcagcaggaaccgaagtacgcccgaggtgagcggggagaacctaagccatctgtccccagagccgatgcccactggtgtgtaacgcaggcctgcctgcccacgcgggactcaggcgccaggcatcgagcatcccactccgggttggggaggagccacacttgagtccaagtcttaatcctccaaattgagggtggccggctagctcctttcccacggtctcattctgctctctcttccatctcaatctggttccagcctcttatcttactattgctatcctcgccaccctgttctcgccctgctccgatgctcgtcctcctacatccactacgacttacgaccttcctcttagctctgtgccctcataattcggtgccctcctcttaatctctacttgaaataattcccctactcaccccacccccaccccccattcagcctccgcgttcatcctcctttcaggtcagcgttctcttcccgcgccagtgttcgcagctcttcgtcgcccctcccccctccgatccggtcacgtccgcgccgcagcatcctttcaacctccatatcctcgcccctccccctcgcagcttttcccctccccccgcattctagtcac

SEQ ID NO: 34949 - DNA, 2064 bp, Mus musculus
gagaccatgctgagtgcctaccaaagccaatactggagattggacatcatgataggcttcccaagatgtttgtgtgctgacatactagttagaacatgcgctggggggtgtttcttactgtaactttggaggtttccttgtgtggggaaagtgatgttctttctagggttgatgagaaagctcttaagacaaggtgacagcccatgtgagaagcctgcttaaactggctcccagggtgtgtgcagtgggtagggagttactcttgttcaccaaggtctttgctgtttgccaatagtcacaagagccctttgcccaatttgagtagcacccacataaccagcacgtgccaggcttttatgctgcttgtgcacaaagcaatcttattgggttaatgtgtaagcaggagacagcttcctatgccaagtgcctcattaagcagtgcctaatctaattgcactcttcaaatctccgggacccaggacttcaggaaccatgccgaagccacacagtgaagcagggactgccttcattcagacccagcagctccatgcagccatggctgacaccttcctggaacacatgtgccgcctggacattgactctgcccccatcacggcccgcaacactggcatcatttgtaccattggtgagtgtggccctccttcctctaaatggaggcttctacctgatttgaaaggcatagtaaccattgcagagctagcctaggttctgagtgaggcacggtccacatttctaggggagtagaggtcttgggaattggccatcaagaagaattagtgtgctttttctgtagttggtgaggttcaggggtggtctttttcatgtgctgtcaccaacagcattcggtagacagacatcttgaaggcagagaaaactgttgccctccacttttctggctgaatgaggccctgcagaatttgtagagaatgttagtgttcccacataattaagaaagtgactagtacaatagtcttttctgtactttggaaagacctttctcttaatttgtgaaggtaattaaaagcaaaggatgaagagttgtttaaatgttgagcaaatttcagacattttcctacctgagtcatgattttcttcctgtggatctaaatgtttcttgatagggcctgcttcccgatctgtggagatgctgaaggagatgattaagtctggaatgaatgtggctcggctgaatttctctcatggaacccatgaggtgagcgtcaacgagatccaggagactcagcgattccttaacagtcgtactgcaggcaggtgtgagtccaggggtcccagtgaacggaacattgccgtttctctcttctaacttcactggaatagaaacctggcctgctttgtcacccaccgaccagggttagccctaccgtcaacctttatgaaagaaggcacgtaagggtttagctggaaaccctaggccatcagatgtcttggcccccatgcttcagggtttttacagtggttcctgtgtgtgaaccaaaaggttctgagcagatggatagctggagtcattttaagatctaccttttaaatacttctctctccccctccctccctctcgacagggtttctctgtatagccctggctgtcctggaactcactttgtagaccaggctggcctcgaattcagaaatctacctgcctctgcctcccgagtgctgggattaaaggcttgtgccaccaccgcccagctttttaaatactttctaacttgactgtggatttcctactggtattggtgaaggagggaaggagactcctctctgcctcttggtttctgtgtcctatttagagtaaaagcattaaccctgtgctgttttgccctctgacctttggaagttgtttggactaaaaatagatggagaagaatggtccaagaagtgaaccccagaacatgagaatcttcatagattccctaacccatattccataaatagcttggaggctagtgcccaaatgtcatggaacctgagatagttcctcaggcacctaagcaatatttgacacattcttgctgggtgtggtgg

SEQ ID NO: 34950 - DNA, 1196 bp, Mus musculus
ggagatgggtgaaggtcaggagtcagacatacttttttttttttatttgctaattgatcatctttagctccagggtggggattggaaactggacagggacacctcacctgccaatctgcctttctttctccagtaccatgcagagaccatcaagaatgtccgtgaagccacagaaagctttgcatctgatcccattctctaccgtcctgttgcggtggctctggatacaaagggacctgagatccggactggactcatcaagggcgtgagtatctagaatagcctggtagggggtcacacttttgctatgtaaataacctatttagtctcactctgggaaacgggtattttgtttgttttatttcttcctcaatatacaaattcaggctttatagaaaggtgagaggtttctttggactttgagccagagttgagcgcccccatcaggggcattggcttcttcagttcacactcccatttcctgctttaatccatagagcggcaccgctgaggtggagctgaagaagggagccactctgaagatcaccctggacaacgcttacatggagaagtgtgacgagaacatcctgtggctggactacaagaacatctgcaaggtggtggaggtgggcagcaagatctacgtggacgatgggctcatctcactgcaggtgaaggagaaaggtatgtctggtacacagtccgtggccaatgccaactccaatccccagagctctggcaagcacagacctcgaatgtatgaagatctgggtttaatctccagaggatcaaaagtctaaggttattgttggtctgcgtccctgacctgtctgaaatactgtctcagaaaaaaggcagatggggctggagagatggctcagtactgactgatcttccgaagatcctgagttcaaatatcccagtaaccacatggttgctcacaaccatctataatggttgtgatgccctcttctggtgtctaaagagagctacagcgtgtataaaaggtctttgggccggagcaagtgggggatcctaaattcaattcccagtagccacatgatggctcacaaaccatctctacagatacagtgtacagataaaacacattaagtaaataaataaataaataaataaatataaaaggtctttgggccggagcaagtgggggatcctaaattcaattcccagtagcc

SEQ ID NO: 34951 - DNA, 1206 bp, Mus musculus
caaagtgagttacaggacagccagggctatacagagaaaccctgtctcgaaaaccaaaaaagaatgtacaccacctcgtgtggctatttatttgtttattcattaatttgaggcaaggtttccctttgtagccctgcctgacttggaattaactgtgtgtgtagaccaggctggtcttgaactcaaaggtctgtttgcatttgcctcttgtgctaccatacctaaaactcaaattttcttagcagtttgtaagtaagtatttataggtgagaaaactgacttggctttcctgaagtgttttgtttggtttggtttttgttttgtgtgtgttggagtcttaattatggctttagagtcctcctccctctgcttcttgtaaattgaggtggtcttctgtgatccctttcacacaggcgctgacttcctggtgacggaggtggagaatggtggctccttgggcagcaagaagggcgtgaacctgccgggcgctgctgtggatctccccgctgtgtcggaaaaggacatccaggacctgaagtttggggtggagcaggatgtggacatggtgtttgcatctttcatccgcaaggcagccgacgtgcatgaagtcaggaaggtgctgggagagaagggcaagaacatcaagatcatcagcaaaatcgagaaccatgaaggcgtccgcaggtgagtcctgagacccttccattgcccagcccttgagaggggtgtggccatggtgtgtcctggatacctgctcagcaaaatacagcctgctgggattggtccaggcggacatctgaatcagcattagggaggccaagtatttttagtcatcattttgggacccggctggatactcaagggcctcagatgtccatgctaaagcttgaagccttagaaatcttctggtctgataatggtgctgatgaggagtggcccattcagcttcccatagagaagcatgatgcctacgtaaatggaaattaattaaggtggcattcataaggatgagtggtttattgacaaatgttcatacttggctttctccctactgcttcccctagaactgcttctgtgggttacagtgggcttggctctgtgtcctttgtactgggcaactgggagtctctttctatcttgataagccataggtgctgatggccttggtatttggggctggggagtgggtcagctcaaagggcagca

SEQ ID NO: 34952 - DNA, 1027 bp, Mus musculus
ggtactttggttgtgcttcctgtcctctattatctttctcttctttaccaggtttgatgagatcttggaggccagtgatgggatcatggtggctcgtggtgacctgggcattgagattcctgcagagaaggtcttcctggctcagaagatgatgatcgggcgatgcaaccgagctgggaagcctgtcatctgtgccacacaggcatgtgctatttcattccttctgcattctccacctaggagacctggccttgtcctgtcctttgggcacacatagctgtgatctgtgcacctgcacaatcttaagggaattatcttggcaattatcactgaagatggcctaggatctcatttagtgatggtcttttaccgagagcccttgtctgtcccctcctagatgctggagagcatgatcaagaagccacgccccacccgtgctgaaggcagtgatgtggccaatgcagtcctggatggagcagactgcatcatgctgtctggagaaacagccaagggggactaccctctggaggctgttcgcatgcagcacctggtaagtcctccaagcctaccaccaaggcctctgcatcacccagtcttttacctccctccgaccacggccagaagagtgaggtgtgtggagcatgctctgcttcttgattttcacgttgtgctctcgctgcctgcgccccaccacgttgtcctgctctggcgattaccttttccattacgtaggccacatctggctaaaatattaaagtcctaggacttagtcaagggataccttcctccctcctgaacacccagacggcggggcggcctctattctaaaggagccaagagtgtgtattcttggctgttcgcctggtttggcttctaatttgatctcttgatggtcccatgagcagatgcttctctgcactgcaggctgtagccatactaagctgctttgagctggccttgcatggtgcctgtcacatgggacgtctcttgctatgccaaacccaatgtagggctagaaatagctctg

SEQ ID NO: 34953 - DNA, 1095 bp, Mus musculus
tgtgtgccttcctgatctacaccaaacccccttcttttctagtcacctgcttagttgtcttatcacctcagagtggtcaggaacaagaccaggtagtctaaaccatgcagtcacatacatggatttatctttgtatagctctgggtgacttatatgaccgcaagaccttgcccaaggtggcatttgatgagattaattataattaattagtcataacattaaacaatttactgccataatgaaatgttagataaccctctgggctcattgatgtaatctttgcattctcattttctttttaaagggaatcacatgtgatagtgtgtttgagcacagatttgctatcctcatagggccagccagctgtctgtttgcaccctgctgtagcaggtgtgggcagagtaggagttagttctcatgtcctgccctctctcatgccctgccctttcctatgaacagacaccttagaacctcgaggctgggattgcatggccctgctcagaagatgagtcacagagtccgggttagactgtggctgccccttcagggggtgcaagcttctctctcatcagttaacactcaggatagcttctccccttcatctgttcgctgcctcctcctctgtctaactgatatagttcatgacctgtaattaagagctagacatcccagctatggtcgtttcctgttcatgtcctttgggctgcatgcattccatttatttgtaactaaaagaatactttccacttgcaaatctgctaatactaccaataaatgtgagttattggttttacatcttctctatactaaaatacttgggattgcactctctaaaacttagattttcattctaatgcctggttttacttgaacagatagtctatatataacacatttgctgttttgtaacagttttaattgctaagttttaattggtgtcttaaggcatgcatgctttctcaggcatctgcctcttcacacggctgtccactgtgttcaagtgagccagagttggccactgttctgtttagaactggcgcaccatgtaactttggctcttttgacctttgaccccagctttcagagctgcccaga

SEQ ID NO: 34954 - DNA, 2263 bp, Mus musculus
aggagaacagtatagtgttatggtgaacattgttggcttccagggcctggtaactctgctgctgttctttgcagaagaagtcaggagctaggcacatggtacttggattgtaaaagttgctggcagctacaggagtgggttctgctgagattgggccaaagctgcctcactgccagatggaagggttcatttgtgggaagaattctaccagccatgctcctataggactgcccatactgagagcaggataatcatcttagaaaagacaggacaggtctgaggggcaggccagaccttgaaacagttgtcagtgggcaaagcctgtggtccagagttgaattagagggtattacttttggcttaggcttactgaaagggtcttatgacatgtttaacggtcagtctttccaacctgtttccatctcaggagtgctcaccaagtggccaggtaccgccctcgggctcctatcattgccgtgactcgaaatccccagactgctcgccaggcccatctgtaccgtggcatcttccctgtgctgtgtaaggatgccgtgctgaatgcctgggctgaggatgtcgaccttcgtgtaaacttggccatggatgttggtatgtagctggaaacaagggaatgatgaagtgctaataaatggggaccctaaaactaccacttcctgaagtcatgggctgggcctatctgttttatcacccagttgtaagattagctggagctactgtcctgagcagggtggggttagagggtggggaacacaagcttttgtggccttattcctatatagagacaaggaggcagctgaccctgactctctagagtataaactgaatggtgtccaaaggtctctgcattctgagttcagcctcagcccttgtttaggctaggaggcttgcaccatcttgtggtgagaagaagtaactgtcaacctgctcccctacccagacgaggattattagggcagttatctgcacctgccttgttggatttgtgtctgggttgggaaaagtgccactttgtgtgatcaattaggactgtggggctttgcagttttcctcaagtgtatacctctactcaccaacctccttttccccccaggcaaggcccgaggcttcttcaagaagggagatgtggtcattgtgctgaccgggtggcgccctggctctggattcaccaacaccatgcgtgtagtgcctgtaccttgatggccctctggagcccctcttctagcccctgtcccttcccctcccctatcctttccattaggccagcaacgcttgtagtgctcactctgggccatagtgtggcgctggtgggctgggacaccagggaaaattaatgcctctaaaacatgcaatagagaccagctattattcagggccctacctgagccaggggtggaggaggaatgcaggactggaaaccctgactttatcacagaagggcggcagcatctctgggctttgcttctgtagaaagttgtcagaattcccagccctagcctggagtcaggagacagcaaaagagtaggggctgagggtgtggggcccagggtcccagtgtagatgacgacttctggccctggccctgacctgctttcccaacagctttggcctccccacttcttgtgcactccacttctgtcactgcagacactccactctccaccttgtattctgcagagtctccaggcctgttgctatagtgcccacctgaatgtcaataaacagcagctgaagcacctgtgttgtgttttgttttgtttttttccgggggttggtagtggtggtcgagccctgccctttgagcaattgagaatgacaacagccaggaggcctggccttgggtgctatggatccaccagataaccttcaagcacgggaccactggagacgccggagactgaatactttgggagtatataagttgcctcctgcaccaaagtgcggctgtgtatcgggaagctgatccgttctatttcagggcaaatactagaaaagtctgggacaggttcagctagcacctagaatggtcgaatagtgggctgatccctgtggtagaggcctgttgagggcgctgtaggatgagtccctgattggatacttcacaaaaccctcagcctccataacagttaagcacaaagggtctcttgttttcctgttgccctcaggaataaggtacatagaaacaaggtgggacccttgtccctggcaactcccaacagccacctagtcagaggctaaggcctct

SEQ ID NO: 34955 - DNA, 1864 bp, Mus musculus
cagaaattgccatgttccttgaacccctggatcttccccacaaaagagtggtatttttagccatcaatgataattctaaccaggcagccggaggtacccactggagtttgttggtttatctccaagataaaaatagcttctttcattatgattcccatagcaggagcaactcaatccatgcaaagcaggtagcagagaaactgaaggctttcttaggcagcaaaggagacaaactggtctttgtggaagagaaagccccagctcaagagaacagctatgactgtgggatgtacgtgatatgtaacaccgaggccttgtgtcagagtctctttagacggcagccagagtccccgctgcagctactcaccccgacatacatcacaaagaagagaggagaatggaaagatctaattgccagacttgctaaaaaaaacgaagtagctactgaagaatgctcgtgatgtttgaagtctggtctttctgcctttctctatggtgacagcctcagtgcctgagggaaaaccactagtagatgaaagtttacaattcctgcttctttattgttctgtaagaatgtcatcctctgtgttctctgaatgggaagtttcactgtaatcctgaggaaagcggtacattctgtggaaatgtcttgaacttacgtaccaaaactttagtaacaaacctctcattacacagtttcaagtaagagccttcttttcttgttggtataaaactattatcccttttggtctcccttccttgttggcttattccaaagaagtgatgttccaaagcaaaccaataacatgaagtctaaagacatgcatgaagaaaacagcagaagaaccaacatctttgtttcacagccatagtgaggcgtccgactggaggtggatcattacctaactccacttatagccttcggtttataaaaataaggcattctcgggtgcaaaggctttcccgtctgcaaatacttaataaagatgactttagctcatctttatctatttcctggaatgctttaagaacatggaacgtcattaaaataaatggctatagactgggagcataactttgaggaagagcacctgctgtggtgtgcaggaagacttgaactcaattccaaattgcagtaaataaaaacaaaacaaaaccacctgcgggtgtgtggtgcatctctggtttccctgagtgagtgggtgactcagctctaagtgatggtgactttgtcttgtcctttacatggatttagtccctccctttacctaacgtgctgtagttctcaagctcacaggataaccagccaagattagctgttatttcagacatgttctacttttggtagatagagcttttacactaatctagcagagttgttttcaggtatgttgtggtaatctccatactattaatgatctaaaacataggagcagtttattttttaaatataaaggaaaaaaaatgtcaccttcctcaaacttaatccaaaaagtaaatggtataactttaaaatatggaaacaagactaaaatgaaatactactccccacaaagctattgataaatttttctacttgtttcaagtaattaacacaagaagttgggcacacataataattagaccccgataacaatttgcagtgtatatgggatgtaaaacacaaagatgtgattcactcactgaaactgacttcagctacttctccactctaaccctgaccccagcgttcataacccaaaataacctctccagtcagcaactacagaggtactcagttccctggagccaggaagaggaagatggtaaaagtgtaaaagcacaggctgcataagcaggcttcagtgtatgggatctgaaacaa

SEQ ID NO: 34956 - DNA, 1148 bp, Mus musculus
atgcatggactttatactgaaggtatttaccgaaagtctggttcaactaataaaatcaaggagcttcgacaaggtctagatacaggtaagatagtatgccctgaatcaagatgtaacacttattttaaaagttatttcacttttatattctgcttctctaaatgtagggccagaacattttggggtatttctttgccatttttgagtctttggctgtatttagtaaattcatcaaacatgtaccaacagtatcaattatagaaagtttgttaggtacttgaaaaagatcttaatctatttaacagactaattagatcctgttatccttaatttatggggaagaaaaatgtaggttcaaggaaattaatagaatgttgatgcaaggtaacaaagattcttagaaacagttttgagaactcagagacgtcatttatctgcatttaaaggtaaggaatcaaactgacaaaggaattcatctaactgcttatcaccaaccagtgacaacaatttaatcccgtgttctctgaatccatactttaaagtgcttcctgttaagtcttcagtgtcctgaccacagacaggattctttgtaatagatatccctagtgcccatgtatattgaggacttggttatgagtgtaccatttagtcccagggtacatacaagggcttgcctttggtttcattaaccaaatatattcttcaacattgttaaaagaaaatagttcttttaaaaccaaacttagatacacaagttgtctttgtgtgaccaagaactccagtggtttttctcaccatcagtgaaaaatgaattattgtgaaaataacaagaaattcctgataaaacttgataaattctgactgagagaactttgtatacgatagtttggggcatttttcaggtttggctcactcttgaactgtgcaacatcaaacaggatgtagatgtttccatcacattttcctgccttctcatctgtaagaatgacttaaattcagccttgcatttagtccccttagacttctgacgcattggtactcaagtgtgtggtacgtagtccaatctacaagacagggacaaaaatcaaaagcaagcaaatagacaattctgcagtagtttgatccttcatgaaacgtgatcttttaca

SEQ ID NO: 34957 - DNA, 1355 bp, Mus musculus
cagatctcatctttggggcctcttctggtcaccttgtttgtaacagtcggtcctaatggtcctgcctcgtttcagcagacagattgtatgctggatcactgggcttctggcaaaagtggccgctttgaagtttgctagggatgggccagctgtgccttggctgctgtatttgatttgagagtccactgaacaaagccacctgggacctgggggattttggccaataatagttgcttcttgcccacctacttttcccttcccacagatagttgctgaactagggagctattgtgatcctgaggtatgctctcatttctagcatttaaagaaaacatacaaacctctgttaaccatggaaacaaaagcttttgagtttgtattggaatagttaggaactgtgttagaatataaaaatttccccaaggatttataagccctctattttaaatttaattacaaaacattcaatgttatcttttggaaacctaaactgatttccattaagcccagagtgtctcagctacaggaatgtgaagagaccatgctttgtctcttgttgatatttggtattatagtcagtgctggtttaacgcttggttaattcctgccaaatatatttcatggggtaaagttctggtagccatactgtattggtatgccctgattatagatcagactcctctaggtttttgtttgaaatatgtcacaggcacatttaggtaattcctaaatgtgaacgcatcatcctgattgatccaagcttttctttttgtataaactgaagactgtatccgagcctactcatctgctggtggagtaccaccatagatgtaaccatttcatcacttatctaggagtactcacatacatacaactgtgcatgagtgttatagaaaaagccgccaaaagaagtctagaaagtttaaatatgatctatttaatttttgtcttcttatcagaccatcagtattagatgaaaaaaatcaaggactacttgaagctatttttgttaatattcttgttcctgaagtttactgtaaatacacatgtataatatgcctagttctttttaaccttgtgctttccccttattcccattgagtttctccctacagataagaggccattagacaggtggtgagagccattcacccccggggtgaggaataagtaagggcatctttttcatcactggtagtttccataagttataatgtcagaagcatcatgtactagcaattgtgggactagaactctgtttttgctatttatgttatgtgaagtgaaacatgataccatttcttaagtatatgaaatgtttatttttaaagtcactaaatacattttgtctaact

SEQ ID NO: 34958 - DNA, 1215 bp, Mus musculus
ttggttttctcctcctcctcttcttttccttctcctccttctccttttttggtttgaagttacaggaatagaagtcttttgttaaggcaaggtctctcctcctacacaacactgaacctcacgccactgcaatagtggtcattggccggctctagagatgagacttgtagcattattttgcacagcagctcatggtggctggagtcttccctctccatggtatgggttcagcattgagacacatgaaggaagttttgaaaatctccccgatgatgatggtcattcagtaaatgctaacttttatatccctccagcattaacaataagagttttggaaactgttctacaggaagccagcatggctgtgatatggtggggtgctgttttgggcctttctggctatacagtctgttatagtatttggggaaagtagctgctactgggtggtaactgttgctaactgttgctctccacttggctcagaacaatttcctttgtttcagaggaatgtcctggaactcagcacttgacacacattctccctcctaaagttttacagctcagttttttgtttttattatttctataaagtaaatttggggctgagaaaaaaaaaaaaccaacctacctacataggtcaccttgtaggaactaggtaatcaatattaaagactttataatttttctcagggacctaaaacctgaatttgaataaagttaaataaaaactttttttttcatttgctagatttgtggattttttaatcatttaacaagccgccaggatgggtgggggaaatccacacaactataagaatgtctcggcaaagtgtaggtccctgtaaggaaaagagtgctgttgttcttgggttagcaggcactattgatctgatagagacgaagccataactcagtagtgtcagatgtctggctccatcagttcttaacagagcctctgaatcctcacccatgatacagatccacatagagttcactgttatgtctgtctagctgcttttcttcagtcttaaaatgcaccaaaagaaactctctggcagcagcagagtgtctcacatgtggaacctgtgctccaaacttcagagcatcctagttatgtcacatacttctagtccacaataactcctacatttttccctactcattaatatgtgtctgtagctgtgtgtcatagaaaatgtagcagaagcaaacaat

SEQ ID NO: 34959 - DNA, 1207 bp, Mus musculus
ctactgatggtgccttctgaaaatccagcatagagctctcatcccaactccagacctgccgtcatccagggcagcagctggacccctgaccaagcacagcctccttcctggtgctactggcctatccaaaattagaacccctttggaaagtcaagagagggaaacaccccatcctgcagcatcgacaaacctgtgcacccctgatacctcagcccagctgcatctgttgccattcttaaagacaagagacagttccctgtctccggacagaggtatctcacaacagagtgcttttttgtttagcaggtacacacgttctctgacattagctccctggaggctgcagcatcgcagaatgggaggcagggggtgaatatgtgctcccactttactagcaaggagactgaggtctactcacataactgagttgctgtttgggaacaaggctaagtgcctaccccagatggttaagcacaaccttctccccacagcaccttcaacctgggctctttccagggcctatagtctgaaggatgaatggggcttcctgtctgaccaggaggctgagaagtttctcattctatgaacagcccaggcttctgagacccatcctctgtccccaagtgctgcctcaaatgagttctttcaagatatctgcacccctgtcccccttccctcagccacaactcctgctgacaggaatctggtgtttgctaagttccattcttaacagaactgtccctggagacaagagagccatggggagagctggccagttgccagggattctctgggccgttctggaactggaacaaactcccacaggctcttgttctaccatctctcctgggttcttcatggtaccacctcgtgtacagccacgccagttaaaccagcaagatgtccgtattgcaatagaaagggtcttatttgagcctgtggactgtctggagtttctatctagtggtctcgcatcgctcccctccactgtgactcatgactctttcttcccacaagccttgaccatcgagactaactttaatgctgcaggtctgagagaaggagctaggaagccctccgtagctctgctgactcactctgcccaactgtaattccaaaggcccaggcctgaagggactcagtgtttattgaaaggtgaaccatcctggggtgccagggactggggagagacaattaggagaagtct

SEQ ID NO: 34960 - DNA, 1183 bp, Mus musculus
tttgcttctcatctctgtgcttcgatccatcagcaaccctgaccccttgtcctggacgtggcctgtttctgtcctctttctccccatctaggataccatcctctccgtgttctccatgcagctcagtgggcacttggcatttccttcagccccgttctgtccttcctgatatatggccgagacaatccacaattatttgctcccatgacctctgttcagaactaaattataataaacccctccattttatatatttgagcccaaatttccagtttctcagaatataaatgtaaatgcaagtaggaccaaaagagagagatttaaatcgagtttattaaggtgggaactaattcagcctggccggtgatcttatgaagagactggtacatgcagagaggagatgagctccagggaaacgacagaggaaagacgagcctgaggtgaggtggtcaaggaaacagccttgccagtgccacgcccatgcacagctccctcctggaactataagaaaacgtgtttttgtattcggttctggagaggcctttgcaaactaacagtcttccatggaatgggttacctctaccctctccctctccctctccctctccctctccctctccctctccctctccctctccctctccctctccctctccctctccctctccctccatcccttcctccatccctctctctccatctcccctccctcttccttccccctccctctctctccctttttccctctccctccctcttcctcaccctttccctccctcctactccatccctctcccaccccctcacaaggccttcctatgcttgctgttcctgcttcttgcaataatctgatgccagctccctccttaccattcagatcccccacaaatgctctcacggccttattttatttctgagccctacagaaatcagcttagaagagaaagagtttattctaactcacaattccaggtgtatagtccatcaccatggggaagtcacagtgaggaacttgagacagatggtcttgtcatatccacagtcaagagcaaagaaaaaggatacatacttagtactcagccagctccctctactctcacacagtccagggccctaaacccaggagtggtgccacccattttcaagctgggtctttccagatctgttgagacactcaagaaga

SEQ ID NO: 34961 - DNA, 1198 bp, Mus musculus
gactcggtggttgaattgcctcctgcgtgaagactggagtgcagatctttgagcccaagtgaaatccaggtagggcagtggtcttacacgcgttctcgcgaccggccaggaagaacacaacaaaccggaatcttctgcggcaaaagctttattgcttacatcttcaggagcatgagagcaagagcaagagagcaagagagagaatggcgaaaccccgtccctttttaaggagaattatcctccgcctaggacgtgtcgctccctgattggctgcagcccatcggctgagttgccgtcacggggaaggcagagcacatggagtggagaactacccttggcacatgcgcagattatttgtttaccacttagaacacaggatgtcagcgccatcttgcaatggcgaatgtgagggcggctccccacacagtggtcacccgcagtctcagctctctggaggcaatggaggctggctagctagagcaagtagaatcagtgagcttcgggttcagtgagatactgtgcctaagtatatatggtgggaagacattcatgaaggcagcctctgccttcttcaggcatacatgagcgtgtaaacccttctcctgatctctctctctctctctctctctctctctctctctctctctctctctctctctctctcacacacacacacacacacacacacacacacacacacaccacagcaaagaaaagaataaagaaaaggaagttcactatccttgccttgatggtcactcagccatctgccaatggcaggcagattttagcgcatggagactacctctgcctattctccactatgtacccactgcctgcccctctcccacgttccatgccattaagcagggcaattaaagatttttacacacggctgcacgtgacaaatggatgttccggtctcttgatttctgctgagcagaagcttccagccaagagtcgacacgagcctgctgcttcagcgtgggtcgggacgattatttcaacaagatttttgacaaggaaataaaactcaaaagtcatttccaggagcctgtggtgaagtcggaacatatgcggttctctgggggctgtcagggaaagactctgcagggtgtttatctgtgttctgggcgggtgaccactgtatatttgggtgggcgatatctgctgagctgtctggatcagagcaagagct

SEQ ID NO: 34962 - DNA, 1147 bp, Mus musculus
ctacaccatgacatatggagtcgtgagcgtgtattgttagaactagtgttcttatgtaaggcaggcatgctgactgcagaaaggaaactgagcccagggccacagctcttttctttagaaattgccttaaaagaattcccaagatgttttaagtgtaataaggaaatcctacccagaactgtttttctaaaccaaaatcgattctttattttgctcctcccatctctcccctcttcctaatctgaaaaccttttgattactgatgatgtagatactgtgtagagccctctataaaatagaagtcaccacagtgacgttaggttctgcggttaatggtttttgtttgtttgtttgtttggcagtgtgcatcaccgggtatacctccccatatgcatagcaggtctatgctaaggcctctggagttgtctttacccagtcagacctcatactctgaaaatgagattttaaagaaagaattggaaaccttgcgaacttactatgactcggcaaaacaggaccgactgaagttccaaaacgaactggctcacaaggtggcggagtgcaaagccttagctctggagtgcgagagagtcaaggaagactcggacgaacagatcaagcagctggaagatgccctcaaagacgtgcagaagaggatgtatgagtccgaagggaaagtcaaacaaatgcagacccacttcctcgccctcaaagagcacctgaccaacgaagcggccacagggagccaccgcatcatcgaggaactgagggagcagctgaaagacctgaaaggcaaatatgaaggcgcttcggccgaggtaggcaagctgcggagccagatcaaacagagcgagatgctggtgggagagttcaagagagacgagggcaggctggtggaagagaataagcgattgcagaaggaatgcggcacatgtgaagtcgagctggagaggagggggcgacgggtcgtggaactggagggccagctgaaggagctgggggctaagctggccctttctgtccccacagagaaatttgaaagcatgaagagctcattatccaatgacatcaatgagaaagtgaaaaggctggcggaggtggggcgggactatgaaagcgctcagggggaaattcgacagctgaagag

SEQ ID NO: 34963 - DNA, 1169 bp, Mus musculus
ggcagggcagggagatggctgagtgggcaaagcaatttttctacaaggttgaggaccagagttcagatccctagcacctaggaactgctgagtgggtgtggcagcctgtctctaagctggatagggatgctcaccagccaaatggcaagctctggctaaggttatacacacacacacacacacacacacacacacacacacacacacacacgcacgcacagacacgcacatgcacacacacatgcactcccacacacactccacaacagccatgggaaatgttcatggaccttattgtttgtaatgtatactgcagaggcctttgttgcccgttggttttcaggagcccctcctgtgtacttcctccgtgtgacctgatgcctttgtttccgtggtagagttcctatggggtactcttacaatgatgaggtgtgccctaggataaaggcctcacctttggagttcaggaaagatgacacacactctcccttctctgcagggccacatggatgaagatgtgcaggcagccctactgcagatcatacagatgcgacaaggccttgtgtgctagcggcagctgacttggagcctgtcctgctggtgctatgcattctgggtgcaactctgtgctcttctgggccttactctgatagtatcagtaaaataaactatattttgttccgttgttgaattttacttttctgagatgagtgtgtcaccgagttttccagtggattaaaagttgatattctgtgttacgtttatttcacacagtggcaaacagccacttttgtgtttgtacttttaaatttttttattcctttttgttttttgttttgtcttttgagacagggtttgtctttatagccctgaccatcctggaactcactttgtagaccagactggcctcgaactcacagagaaccacctgcttctgaatgctggatgctgggattaaaggcaagcaccaccacacccttgtaattataccttttaaagctacattttaaaaatagttgagtccgtgttaaaatatgagccatctaaatgggtccatgtaaaaaggagttgaggctgaaatagcactgaaagattgattttggagaactaagtttagctgatagctgcttttaagtggatcagaagaccttccagggggtgaggagatg

SEQ ID NO: 34964 - DNA, 1119 bp, Mus musculus
ctgagccacttctgacctagcctgaactcctctttccatcctgagcttttttttttcctattttttttccccattctattccatataccttggcttcctggactggatcctgagccttatgtgctcaactctgacctttgaccctaatgagaacattccctggtttatcccctagtatataagctgtgctcctggaggcaagaacagctcctcctattgggaagatgcacgcgaatcattgctttggagggaggacatgttggtgggtgatgggcacaacgcttacactggaataaaatgttgtccttgaactctggcagctatccagaggtcagccaatcacattttacccttaattgatctatcagattagctttaacggcttgggggaggaaacggaaatgcagcaggaagcgattacaatagactactgctcttagggattccatttgatcttcaaacagcctgtcacagagcgagggggtgggtccccattatccaacttaggcagtagctcagccagcctagtcgaatctcctgatgtcactaggcagcagtggagaattctggaaaactgcaccaacatcccagggctcagttctgggcacttgatcccagaaccctgcagagctttggccagcatggctcccagcacagacttctgagccttgtgtgagcccagggaagctttgggggctctggacatcctctctccccaccctttctctttgccttgggcctagggtggcagtggagaatcagctcagttttcatcggcgctggcgtctctcagggcagcccaggaaaaagacattgatttatgatcaaaaaggaggaggatgcgggggagatgcagggcagcaggggtgggtgggcgctaagagatagtatcagaaagaataaaaaagattccctatgccttaaaaaaaagatgatgaggaggatcctgccctctgatgcctccgtaggcgtgggctggaaaatcttttcatgtaaaattgaaatggaatcacgaatgaggagagggcgtcttggggcttgggtgtgccttccaggactgaattaaattaaaaacatatcgattttccctgccaacaaacaggcctggcactggaggag

SEQ ID NO: 34965 - DNA, 1219 bp, Mus musculus
gcagctgtcaggggacagagtgaccacacagggtcatgattgactgccaagggaccagcccgagccaatccgggaaggttgcttgtaagcagcagcagtggtgtagactgggcatgcatgccctcagaaatgggcacacacccaactcattctaagtccacagcttgctccctgtgctctgcagtttgcgcatgctccctcccagctctggggtgggcacctgactcaagcctcctgtgaacctcgcccatgagccatgatatttcttgcttgttagacttgcttcatccttttaacagtcagtaccataatgtggagtatagtcgttgccagtttcttagggagtgagctgagcatagctttcagggcctgggaattgcagcccctcctgctcaacctccaaagccagcttcctcaatgggatacaaatgacatcctggggtggcgggtaggggcaacagacagctggttagcggatttgtttgtaagtggtgagggaggagggaggaggctctaaccctacccaaggggctgctccagccctgcgggtagagggacactgaactgtctgtccttgcagatcttctccctgggttactgccccactggggagtggctggccgtgggcatggagagcagcaatgtggaggtcctgcaccacactaagcccgacaaataccagctgcacctgcacgagagctgcgtgctgtccctcaagttcgcctattgtggtaagccctgaagccctagcctggcatgagagccagcatggggagcctggtccagtagacagtggggaagtaggggacccacagtcttgagtcagccaagcttatgctcctttaatgtcctggaggagaaaagtaccttccttgtcccccacccttgtcttagatatggatgtcactccaggacactaaactctcaggacagtaggctttccatgttgacctggatcttctctgaaggttacacatggtgccaactcttagcctcagagaaactgtctgggaagagtacgtggctgtgggggatgttaggagccacagctaggagcgctcttggaggaacgtcctctctgactattggtctttggctgtttctggtgctctctccaccttctggtcatagactgggaaggactagctgactttagtggctttggcagggatctttttgggaaacatgctcaacacagttaattgcattttgttctgtt

SEQ ID NO: 34966 - DNA, 2346 bp, Mus musculus
tgggcctctttctaccagcacctgctcagcctgagccggagagtaggatgcgatttcgttcagagccctgaagtgccagggagaattcctgtctgttttctccccacactaaatgtcttcctgtttctccatgtcttcctcccccagtcaaaagaatcctcatctgtcttgagctgtgacatttcagcggatgacaaatatattgtaacaggctctggtgacaagaaggccacagtttacgaggtcatctactgaacaaggactctaacaggcctgtcaaactctgggagagacacccacgtggccctgacagggagatgctggccaggccccgaggacggcagaaggagggagcagcattgtggggctgccctccagaaggtggagaggacgcacgccccttcgtggattgatgtgtctgacagacttgaaggactttctcctctccccctaaccagtgctggcagatgcttcaattagatttctctggaggcttctgcttccgtttctcccacagacatcctcataagtctctgtctcttcctcccttctctgacctgtccccgccccactctgggatggggggcggggagatgcaggagtagacattgttgtttctggggaggggcgcctcgttctgattgtgcagtgcacaaggtttgtgaacagtgtaaataagagactggttgctgactggccagtgagggaggaaccccatcccaccattgctcgccgtggattttgcctgctgtatttgtaacccactcatggtggtggcttttctttcttttcttttctttttttttcctttcttaaatttttttttaccagctgttctgtggggaaaggaaacagagataagagagttggggagccgagtgaggagcttcctggggatggacaagccatcctggcgcactgggactgaagtatatctccacacgggttttagcgccatgtttagatagaatgataggcagatggacagacaagatgatggacagtactgggatgggccagcctgggctattacccacaggaacagcgaggattttctgtgggttgctctgccccatctgtctcttgccttgcccacacacctgacctccatctctttctgtcccctgccttccccaccccaccccaccccgcccccatctttctctttggtgcacactcaatcattgtgatgaggaatggaagttctagggaaccccctctctgactctcctccagcgcagcctagaaaggattccatatgggggtgggggtaggggggagatgaagcgactcagctcagggagctaccagagaaaaacagcaactggtgtgggtgcttttttttttttaatttgaataaaaataattagaagtgatctcctttgataagataccgtctcccctttcctgctctcagccctttctgctccctgaagcggggaaatggtgacccccccccccaccagtctgagaagatgggcgggacagcgggctgggggctggggcagcagtcatctgcagatatcaccccctagagtaccaatgtttgtggtattaggtttgccttgttttgttttggtcttttgttgttttattaaagaaaagctaaagaccgtgtgagccctgctggtgggctctccatggatgtagcatatggaagagagtttttatattgcatttttatggattattttataatgtgggactccgtctgggaaggaagatgagggtgtctaaaaccttcccatctccagagctccagctgagcggctgcccggaacaggatgtatgttgggacatggaaagaccgtggcaccctgcgccttcctgagaggcatgtcgtcgtgcctgtctagagtctgtccatctgtctctgggtttcagatggtcactggccaccacttgttaaggctctagccagaagggagggttagggtggaagagagttattcctgaagaaaaaagaaaaattgaaaagtcattgtaatgaagctttttatatttttaaaagttactatttaaaaaggttggtttgattgttgtgttttaattgccttttttccctccagtgtctcagtcatgcctgggaaagtggggtccatggttggtccagttgcattctggaacctgggaagcatctcaccagaaagtcctcctcccttttccctcctccctcctccctcctccctcctccctcctccctcctcccaccccatcaaaagtctgtaagggctgttgggctttttctagtccagagcatactacaccactgcctttggtctatgcaccaggcagaagtagactgggaacccctggctaagatgggtctcatgggcagcaccatgc

SEQ ID NO: 34967 - DNA, 2231 bp, Mus musculus
aacattaaccacgatatattgcatttgatatgcaactccgggtcccgggtggtatttatcaacctcatcacagacacagttactacggcgcgcacgcccggggtgagggtgggttgggaagtccaccacgtgatccgcaaggcttgaggcggagagcgacttttcagtgtacccaagccgtgggaacgcgcctgtcagtttaagcagtacgtctcccccgatagctctctccctttagcctgttaatctctactgttgagcacttgtaatattcgcaagccccaaaggccaatcgcaccggaagtcgaacgcgcaaatccggaactgcgttctgcagacgcgcctcctctcggttttggccctgccccttccgtctcgagtcgggcatcgattggtcggcgcggtcccataagaagctgcgcgcaggcgtatatgatcttttcctcagctgccgccaaggtgctcggtccttccgaggaagctaaggccgcgttggggtgaggccctcacttcatccggcgactagcaccgtgccggcagtctacagcatggcttccgtctccgagctcgcttgcatctactccgccctcatcctgcacgacgacgaggtgacggtcacggtaagtgcgggataaccccgggccggccacgtgtttgtgcggcggacacccggctccgcccggacttcgcattctcaggcattcggtgacttggaggcctgtgaggcgtatgcgctctgtcctccccgcgcggcccaacccgagacaggtgaatggcggtcccgagcgcgcatgttaggcctactgtttagagtgggctgtttttatctaagttttaggcctcgaactcaggtcgtcaggcctgcgggacaatcccacagcccgctgagccttcaaacctggccttgtcttttttaaggttgactttagcccaagtacgaaacttaactctgtataagtgactgagttttagccgcattctgatcgttctgacgggttggcgtttgtgttccaggaggataagatcaatgccctcattaaagcagctggtgtcagcgtcgaacctttctggcctggcttgtttgccaaggtaagttttggggttacacttggtaatgtacgatttccaccaccagccttgatttttgtatcttagtttgtacttattgatgtggcttttatgtcaggccttcacggtccatggcttgagaatgagttttgttgcctcttaagtttgggcatttgaagcagtgagattcatgcaaagtggatagctacattctatttatacaaacagctttatttctggcaagtggggtcaatcaactggtggcagttgtatattgattccctgtagtcctgaacattgctttggtctcatgggtgaaaagagcttaattgaatcattaaatcttgcagcacaaaactaaaagccttttctatgtctctgttgtaggctctggccaatgtcaacattgggagcctcatctgcaatgtaggggctggtgggcccgctccagcagctggagctgcgcctgctggtggtgctgctccatccactgccgccgccccagctgaggagaagaaagtggaggcaaagaaggaagagtccgaggagtctgaagatgacatgggcttcggtctttttgactaaactgcttttgttaagttggctaataaagagctgaacctgtaggtggactggtctcacttgtaagccacaaagctcttggagtttcagagatggtagcaggtcccaaaaaaatgtcagggaaggagggtcttgaccaaagccaccatgagttatataaataagacctgggtcaaaagaactagacgatctgggtagagaatgggtgggtctgtctccaggaagccccttcaagcaactgttcagagagcctgtttagtgccagacagacaggctgagagctaactcttactgtcaagaataacaaaataacctctgggtctcccgatgttcatgtgtgaagaacttgacagttgttgaggatctcagaagcatctagaagggccagagaacctaccagtccactggtgtaaaaccagcagcctaaaggattcagtcacgcagcaaggcttggtgtgtaactacaacttcatgtagaaagtttaggacttggggctgacagtgccaggtaccccattgcctctgccttagtgaagaagctagggagtgggttcaaagccagcctgaactacaaaacataa

SEQ ID NO: 34968 - DNA, 1153 bp, Mus musculus
ccacgttgcaacagctacttgacttatcttgtgatcccagaatcccctaagaggtcacactgagcctgtgacagcactgtcagtgcttggcttgtcagacgtgagggaggatgcctctgtgtcactgggggtaacaaaatgagactctgggtgtgcaggaattctgcctgtgaagtgggatccacagcatgttcgacgggtgggagaactgggcatgtatggaggaacactgccagggacccatgcatttttgcctccagaaaactacaaagttccctaggtttttaaatcatgtaaatgtttacttatcctgagtatagagagaatggggagggtattttaattttttgttgtgattcttttttttttaaggatattggtttggttcacttctctgagttagcttccatgttgaatctgtcaccatttcagtagtaaaacagccaaaagtttctagaaaagagcaggtttgacctttaggagttactgtatataacggcttcgttcaagagcctcacgacatctgtgaggtgtgtagaaatgtcacaagcactctccagatgcagggcctctgtctttgttggtgtacagactcttaccaaaagctgctggtttgttcttgtaattgtttccttgcttctccattgtacatgtggggtatatgccatgtgtcaaatatgcaataatgtgtttactggatgccctcctggagggtggtcctctgtaaagctgtacagcctttgcagttcaagcacaatgtgcacatgttagttttatatacagcaaaacttgattttttcaaatggaaaggtattttgtttctatacaaagttaaatgggttgtttgtgcttaatgtaaagctgctttataaaattgtaaaataaagtttttatctcgaaaagaaatgtacttggatatttctcttctcttctgcttagtttgtgattatgtgaacccaataagcatttggccaatatttctttgaacctgaagacagggaaccagagtaatctcgcaggagccttagtctgtgggggccacagtacaccagacaggttcagaacagaaagggctgcactgcacttggtcaggaactgaagcccacgtcagggctctagggtgaggacaggtggaagtagggaagggacaact

SEQ ID NO: 34969 - DNA, 1133 bp, Mus musculus
cccacattaaccagctgcagctgctcagcaccatcgatgagtccccaatcttcaaagaatttgtcaagaggtggaaaagctaccttaaaggcagtagggcaaagcacaactagagctcgaaaccaaaagtgcattccagcctcttctgtgtcgctcagcagcagagctcagcagcacgtcgcacactttaaatgctgtgttctgggtttgtgggtcacagcactgtaagaagagacccttaaagttagtcttctgaaacagttgcattccacggggcaggtgcttagaaaggtatcgaggagagcgctctgtcagtgcactgaaccaagacctctgccctctcatcatgtaggcctccatgcagagtcactctcagtctgaggaagatactggtaagtcactgctgctagcctgctgcccagcacttacctaaaacttagtatggagtgcttttaaaatgtgattatttatatttatactgaaagcaggcttttagaaatcagtgtgctgtattacagtaaatgtgtgcgtatagcctggatcgtggacttttttaagtgtttctttcccataggttcatttcttgagagggagtgagcatttgttgcatttgttcaattatatatggaaaatattttgaattatggttttcttgaactctgtatatctaaacacagcccgtgttcaggtttcacggtcacatacataagcacaactgaaatgaaacttgttgactgcacaagaagtcacagacatgctgtgttttatgaaacggtctacaatcagtcaaagtttgataatcgtcttccccacgtctgctctagtgcagtgtgtctgtatcactatctagaaggctgcatttcatttcatactatcctttagtagtcctgtccaatgagaggacattacacagaatattaattataagcctaaacttgtgacagacttgatgctttgaaattgaccattggtacctcctccttaaaagagaagtgtcgtgttcaggagtcacagtaaagtctctcctgcctgggttgtcaccattgcttttcacgtcgtttctgtccttgctgtttctctgaagcttaattttgaacgattccagcattgaaacagaaaagatgctactgtgt

SEQ ID NO: 34970 - DNA, 2331 bp, Mus musculus
tcaccctgagctgcaggccttattgtgggctctgagatgggatgaaaggcctttctaggcagggacatctctaactcatgtaggtgtgcgggtatagtgtatgtgcttgcgtgtgtgcacatgtgtttgtttgtgcatgtaccatgtgtgtaggccagaagttagtgtcaattttatttctcaatttctccgccttatattttgagccagggtctcttgttgaacctggagctcactggtttggctaagccggctgccggtgagctccagggttccacctgtctgtgtctccaaggtgctggaatacaaatgtgtgctgctaggccctgcctttacctaggggctggggtggagcttggatcagtgggactgggagctgcctccccagatccagcaggggcactgctaataccctgctgtctttctttgcccctaggaggatgaggaaggttacaatgacggggaagtggatgacgaggaagacgaagaagaagctggtggtatgtcagccttctctctcccagtggcagcctgacccctttgactctagcattgccctgcttgggctttaagggccaggcgatgggagggggcacccacgcttcctggatgtgttctggttcccagtgggggtggggctgccgggaagatggctgcctgataactctccctttccctccatttttccagaagaagaagggagtcagaagcgaaaacgagaaccggacgatgagggcgaagaggatgactaaggaatgaacctgtttggggaaattcctattgtgatttgactgtttttacccatatcccctccccctcctattcctgccccccgaaacttatttttttctgattgtagcattgctgtgggaaggagaggggaaaagtgtactgggggttgatggggggtgggggtgggggggaggggaggaataaaatactatttttactgccacactttatttccccccctcctttttccttgtgtctggttttgtccccataaatgcaatagcttagtgcacaccaagcaagtgtttgttcttactctctggagaggatggcttggaggtctaacattttctggtatgtcctacatccccagagttgatcgggaggccgtggctggcctctgccaggtgactcacagcccctgtcatcttcactaactcctgttctggttccggttcgtgtggtcgctgccagaggcacccagcaccccggtttgtaaatagcaaccaaaaggcgtattttggcactggtttggggacagtccccatctcgcatcccttttccctccctccacagatggcagtgggctttgctttttgcaaagagaactcttattactctggggctatgatcccgagagccaaaaagaaaaaatcaaaataacaacaacaagaaaaaaacaaaaaacggcagggttaggagatacttgtaaaatgggaaagaagtgaaccttcatgtttcagcttcttaaaaacaaaaacaaacaaaaaaaactgttctatttggttctgtaaaatattagagcaactggttttgcagaaatgacaggaggacgcatctcaggcgctccagcttagaacccttttacaaatctacgctctggagctccctccaagagtcctctggggttttgttctgcttgttttccttctcacatacattggagcacaggaaaggaatgcaaactcgtattttcttacccggtgggactctgaaatggccgcaggtttctcctagggaatgctgtgtgccttctgcatccctcttccagatcgctttagaagtgacgtgctgtgtccctcctaccctgcgtctcattggtacagaacaactgccactcatttttctcccgcccttgagaagagccaaactttgagttttatgtctgtttgtcattgataaatttcaataaatcttttttatacaattttttgggagatggcttcctttgagtctttacaagccattgatcgtcctagggtcacctgctggccctggagggaaggcttgtaatgtcacctgctaaacagctttcttacagagtaaatagccttacaccgagatggagggagaatttttgttcgcaaagcagcaaaaacatatctgggtgggatatgttctacttaaaggctacagtctttaaagtgggggatggtggggggggggaaggtacaaaacttataaataaataaataaataaataaataaataaataaataaataaataaataaataaggcaagccacctaaaaggcacaccaacaataaatagctcctgttcttgtttttaaaatatctttggttaattttttttccata

SEQ ID NO: 34971 - DNA, 1899 bp, Mus musculus
ctggggaccagttggtagaccctacctaccacctcaagaactggaagctgacctttgacctcctgacttcatgctaacatcggtcccccagcctctcctggaaagcccacccctgactggctgcggcttctccttgcagccccaagagccaggctttcccccttggctcccggcaagtctcctcagagggacaggatgagtgggattacagcctggtttagatcttgaatgtgtcccctgcagaggggctgccaggacctatctacacaggaaccagtcgctctgaccccagcattccttctgaaacacagagagggctggattgtggggagagcgctctgcccaccttctgcctccttctgctcctgctgccgagcaagctcaagtcatctcacccaatggttgagcgcctggcagcccgcccttttctttctgaactccctcccacccctttgtcttcagggaatgaagaggatgtgctccatggccataatgaccctttgcctacctaccctgtggttctcttcaaagctcttttacaccacttttccatttaattcgtgaagcaggcagagtaaggattagtgtccctacctgtcaaatgacagaaccgaggggtcactcagagggtcagcagcagaccaagtacccttggtatccagagctttcggccagggcccttcccactgtattgagatgccaatccccttgtgggcttccccagaaagagacctggaagccacttccactgtctgcccaacaccagtagtgccaacacgcaggctgaggctctcacactcagtgccctggaccctcctggcctgcgctccttgctctcactctctgctggggggggggggggggctccatctgacagtgaggcctcttcctggaagctgaggcagagagaaagaatagagtttggcccttgggcaggcagagcaagatggcttccagggacgctctgcctgtgtctccctccaccccgctcccttcccactcccaaccctgctatctcagccactttcagccttacacacacaggatgaccacagccactccacccacatagcactttaaagtttacccaggtttttgacacatagatctcaccgactcgtgcatctgccctactttacagtgaaggtaaccaggaaatggccctctgcacgcagctctgggatgcggcatctctttggtcctctacacgcttgctttagcccctctcccctccctctctccattctccacctaacacatggagctcaaaagcactggtgtcaggacagtcaccgccctttgggtagaggagatgtggggacctcggtcaccggctgggatctgctatacataggacacttcttgcctgcccaccctgcaaaacttcccaactgcagatgccctccaggcgagctgaggtgagatttccccagccctggggcctctcctctccaaccaccgacgttccccactcccagcgtgctaaagcgagttctcctccccaccaccacagctagactgtcagctctcatctcccctccacacttctggaattttctttctctccattgacctttgtggtcttctgtgattatttatgctgcctcccaaggttagaattgaaataaaatgttttcaggttatcaagccatgtatcaagccatgttttcaggctatcgtggccatgtcatttagccgcagggagatcctacgttggtcacctcgttgtctctgtggccagcggcacattcggctcctctgtctttctgaaatgacagctacctctgtacagctatcctgccacattctgttcatctgacactgttgacaaccccggggacgacagtgctttgctgcgggggctgtcctgtacactgtacacttgtcagtgtccctgcc

SEQ ID NO: 34972 - DNA, 1624 bp, Mus musculus
tgaaatcttgtgataaacagggttcttctcaaaataacccaggcagagggcagtggtagaagacttggaactggagcaaagctgggtggcagacgctagggagctcctgggaccatttttcttatttttgtttatatttaacatttccagttttaaaaacaattttttaacaaaagaaaagaaacgaaagaaagaaagaaccctgccttttgaaggcagaaatatgggttgccgagattgcccgagtgagcaatcgtgagggctggatccctgtctcagccctgagggtgaagcaggagggccggaggggatgaagtggagtgacatccagctacccagatgcctatatggattggaaccagtgacctggggaaagcattccgagttctctgtgcaggagagacagagcccgccatcctcctgtggctaagccgtgcctctcccaccttgggaataaataactcagacgccgaggcctcagctttacccatagttacgacattctgaaagccaggaagtaactgataagcaagcaggacaagaaagggaaacggccatctacaggcaaggagacagacagctcagaagcagggcatgatggcgggcgccagaaagatcagcatcgggaagctgaggcaggaggattgccatgagtatgagatagcatgggctacatagtgagttctaggccagattaagctgtgtgtgtatgtgttgtttagtgttgtgacaggctttcctctagccctggctggcctcaaactcactatttatccaagggtgatcttgaacttcttttcttggttgctgagattacaggcgtgtgacaccacgtctattttatatagtgctgggtagcaaacccaatacttttcgcatgctagacaatatgctaccaggtgagctgcatcccagctccaggcctgggacatttgacaggtgcgtatggttggaaagccactataaccagtctccatggttacatcacctatacttggttgtttaagcatcgcctttagcaagactactctctacttaacatttttatagaaatggcaatgctctgtcctcattggtgtatgttatacttaattaaattataaaagcacatccataatcaaatgtaatcatgccaagacctcctaacacagtgactgtggatatcccagcttgctttctagtgctgtggtaagttgctatggctaaaataagttggagaggaatgagtttatctgacttacacttccacatcccagtccatcactgagggaaggcaggaacctggaggcaggaactgaagcacagaccaagcaagaatgtggcttgctcaagtgcagggcccctgctggtagcctactttcccagtcagtgttttgtgggcatctgttagtatatttcacagaagcaatcagaatctagtagacccagagagtcgactgtacgaaggtctgccagggtaccaactctttacccaaaccactgcgcacagacgcacacataaggccaagtgtcattctgtaccctcaattgcctcaagaagagaagagggactggctctgggttcgatcctctaaaacagagcaacaacaacacagataaccctagcgcctgggaggaagagaca

SEQ ID NO: 34973 - DNA, 1165 bp, Mus musculus
aaccacagagtgaatcgggtagtgttcctgggcaacatgaagcggctcctcacgacaggggtctccaggtggaacacaagacagatcgccctctgggaccaggtcagccactgggatgccagccggagggcagggaggggcagccagcctatatctgagctcctgaggtttctgctggaggggtctgcaactctggtggctgtgctggggtttgggaaggagccacactctcttcttagatgcagcctgaccaacaccaacctcctccctacaggaggatctgtccatgccaatgatcgaagaagaaattgatggactctcaggcctcctgttcccattctatgatgctgatacccacatgctctacctggctggaaaggtaggggtgtgtgtggggtagggactgttaattagcaggagattccagtccccattagaatgtctctctggccttatccctaagaaaactaacctaatcattgtggcttcccatgagccagcccagcccctagctctcaccatttctagctacacctctgtcgttcttctgaaatgtcagtgactgagaactcctttcgggacaagttggactggaaggataaagatctaagcctgacatgtgaccaatggcagaagatgaaacacctatcaagagatcttccaatgtggccttggcagaaaggctgtatggacatgacaaaaccaacccaccacacacatcacaccaaacactacattgcacatataatgtacataccacatacataccacacatactgactgcaccatacatatgcaccacagagaccatacatacatagtacactgcacacatatcacacatgacactacccatgtatgctgccacataccacaccatacatatgtgtcacacaggctatacatacacaccacattacatacacattatacagatgataatatatactacaatgcacacaaacaatgcactacacctacatataccatacatacataccatatataccatatatgcatacacacgtcacagcatagacacactatataaacatgctacagtgcacacgtgccacacacacactcacacagcacacacagcacacaaatcccatgtaccatacagacactcactgtgatcacacatacacacatatcacgtata

SEQ ID NO: 34974 - DNA, 3223 bp, Mus musculus
caggagagggcaggaaaggagacttaaagtttcctgctccaagggtgcaagatgcagttgctgtagttgtgcttcgtgtgtgtccttgtgttagttattttcctaacttgagagtttacatggaagacttttctgatggcttaaagggaggtgttggaatgccctaatttgggaacttctgacctagaccctcttggtgtgacttaaggcgatattgattcaccttgctctggcagctctcagtggcctggaagagatgacacactgcacaaggtgagtcagccctgcctcttctcaggctcaggtcaggtcttttcggacactaaggcccaatgaggacagtgaggaatagctgtgaaacttagtattcagttggttccatttttttaatgtatatgatttttaagcacccaaactgaaagtatctatcagataatactgcatgttttaaaaacatttttcctccttcactacccaggaccaacactgttctaagacattatttatatatgagaataataataatatacatattcagatgtagaattaaaggacagcttttgaaggagggaagacagtgctgaggagggtggagggaacggaacggtgctggtggtggactaactagagttgtttagttgtgtagttgcacactatgtactcttgctgaggatctaattctgtctgtaccatcactccagatttgcattgtggaacacctgtataaatccattataggagcaagtgtcctcatgcctggccttcccgttatttgtttttggtaaaattctttgaaagtatgctcagccaaatgttccatgaacttttgtttttaaagaaaaataggtgtgaaaggtggtagcattgtagctagctcactaggctgtcgtgtgttgcagccatgtctgtcatttgatgtttgttattggtagaatcatgctttgaattgtaacccttccttgatagtgttagtgatttccccagaacatgtcacttgtgtaaattgtcacataaatttgcatgagccaggagtgcaggagggtgcttttcacttttcatgcagttaggaattaaaaccttacacttcagtgactgaccccagtctgggcagcaaagctatctatccatcctcttgttgaagaagaaggggtagctgactctgacactggctttttccagtccactcttgattataatcacagcacaaccacccagaggttcttcactgtgggaactttaaacatgcaaaccaaaacaacctggcccatctgccatgctttggttttgctagtttctgaaaggagttttgatttcattacactaatagttgctaaatggtgattatgaagacttaggcatgatagcattgtttgacataaactgtggttaagggattaaaacctccctaaagccaacactgttttagacaaacatttctgaaaactcaagtcctagagaggagttactcattgtaattgaggcatcaggttaaaatgaggttgctttggataatccaagcagcagaatacccgtgttctgggaatatggaagccaaaggacgcgtgctacttgaactctgtgggctgagaagaagccagtggctgaacttgagtgggcgggttaaagtatctgtgcctcatgacaattgtaaaaatccgaagtgtactttctcagctacccagatgtcagtgcacgcagaagtgcacccttctcatgacttaactgcagcagaaatagggaagagtaaaaccctcaactctgcctttggctctgaactgatttcagtcagattctaagctgtgctcactcttactctgaaagtgcacagctccattctggatatcatctgacagcccctcaatatgtacatacactgaggggctttctttgaagtttctggcaaacctgccagagatgggccaggcatacagcagcccctttctcaagcctgggatctggaacaaattctatagtgacaatgctgattggttgactactacaaatgtaaagtaaatgtggtctctagtcctaggtttgtggagtgtacctttgtgttaatgtgtagggaagggacagcggtttgatggttatggggagcacgtcactgataaatctgcagggctgaatactgctaaattacagctttacagctttcctttaggggtgaatcatgggatgagtagcctcatcagaaaaatgaaggcatgaagatgcaggtctgccaggtgaggacacaggcaggctttgcacctatttcctatcaggtattgtaaaatgtgtgcatggctttttttgttgttgctcagtaatcggtagagaagagatgaggggacctctccctgcaagctttcctaaccagtcttttcagaagtacatagctgggaagtaaaatctggccttaacctactggcaggaccctgtcctttgtaatgttcaccgcaccctgcagtccttggtgcagaggagctacatagttgtagtctagtaattcaccgtggtttactgcgagccagtgatgtcattctatcgtgcgctcttgtcaagccatttatgtgactttaataagcttagtaactttgctgactgcaccggggcctatcagtgacttatatattgcatgatgtcttcaacttgagtttgacatgtagaatcacctttgatttcatggcaattgacagtcctaatggctcagctaatttgaaactaacaactttgctgtgtaaaaggaaaaatggtgttgtgttcagtaaatgtttgaaaaaaaagtaccttgaagtttgtgtctttattgttcggtgtgagatcttttgttgagttccttttaaaggggttgttgaagttacatgtgtgtggggtggaatcctctattaaagctcatagtaaagctaagctcttccttcccatgtccacttggactctgtagagacaaaaatcataaaatgtctttcagaagcttcccatacattttctgtgttaccttacattacatttattttcacttgaagagtgcaaatggacttcatgtttactgtttaatatgtcaagcatgttttcattcctcatatgtacatttaaaaatatacaacttcatagcatgtctatggatggtcttaaagtctgtttactcagacttttattggtgggtatttagatgttcagttttctcagtgatgtggtagtgaaccccgtttacagctgcttgctagccttgcttttaattctg

SEQ ID NO: 34975 - DNA, 1608 bp, Mus musculus
agattgagttctaggacagcctggactacacagagaaactctgtctcagaaaaaaagaaaagaaaagaaaagagagagccgggcagtggtggcgcacgcctttaatcccagcacttgggaggcagaggcaggcgaatttctgagtttgaggccagcctggtctacagagggagttccaggacagccagggccacacaaagaaaccctgcctcgaaaaaaaaaaaaaaaaaaagcttcttcttcttcttcaggaaaacaccaaatggcggatgacgccggtgcatcgggagggccgggaggacccgggggcccaggattaggaggccgcgatggcttcctcggaggattcagcagtggtcttaggggccacggtcgtggccgaggccgcggggctcgtggaggtaaagctgaagacaagagtggatccccgtcaccaagctgggccgcctggttaaggacatgaagatcaagcccttggaggagatctacctgttctccctgcccattaaggagtctgagatcattgacttcttcctgggtgcgtccctaaaggatgagggtctgaaaatcatgccagtgcagaagcagattcgggctggccagcggaccaggttcaaggcttttgtcgctactggggactacagtggtcacgttaagagctccaaggaggttgccactgccatccgaggggccatcatcttggccaagctttccatcgtccctgtgcggagaggctacttggggaacaagattgacaagccccacactgttccatgcaaggtgataggccgctgtggctctgtgctggtgcgtctcatccctgcccccagaggcactggcactgtctctgctcctgtgcctaagaagctcctgatgatggccggtatagatgactgctacacttcagccagaggctgcactgccaccctgggcaactttgctaaggccacctttgatgccatctccaagacttacagctacctgacccccacctctggaaagagactgtcttcaccaagtctccttatcaggaattcactgatcacaccagagtctctgttcagaggacccaggctccagctgtggctactacataaggattttgtacaagaaaaataaaagaattaagtctgctaaaaaaaaattagaaaagagaaagaataaaggggttttgaaagcacacacatggggaagtgggggaaatgaggccacttggtgcactggctcacactagaggctccttaacaatttctccctctatcccaggaagcacttcagtaaatgagaacccctgacattagtgcggcctagcttaggggggcaggtaggggaaagaggtagcaacaggatgaggggaagagccgagctcgggactccagactcacacacgtggatgctcagaatcctgctctgcactgcagggctttctctctcgtgctggcttttcctcagcctaatgaaagctttcctttaccagcaatacacagacaaaagacaggcaaacttctgaaccaaccgtttccttctgcggggctttgacagtgatggcagatcacacaggggaaaggtacctcccctcaacaccgcaagatgaggaacctcaagctt

SEQ ID NO: 34976 - DNA, 1714 bp, Mus musculus
tgagatgttccgattgactgggagggcagcctaggacttggtccaggaggatgccagagatggtgttgccatggcacccacttcacctccacccctgttctctttctccaggtacctggtcaccgagggccagatcttcatcctcttcatcttcaccttcttcgccatgctggctctcgtcttgcaccagaagcgcaggcgcctcttcctggacagcaacggcctcttcctcttgtattccttcgcgctcaccctctcactggtggctctgtgggtggcttggctgtggaatgaccctgtactcagaaagaagtaccctggtgtcatctatgttcctgagccctgggccttctacacactccacgttagcagtcaacagtgaggcttactgggggcaccaggccatggtgtttgtacatgtgtgcatacatgcaccgtggtaatgtgaactatgcactggtggcagggatggacagagtgtgctgttgagagactcaactgttctggtcaggttctgagtttgtttttttcttttctttttttcccccctttggacttaagatggaatttagtttggggaagtatatgaaggccaagatcccggcccctgccctcccctgtatttcattactattagaggtgcctgaataacacccctatctctcaggactgggctggccttatggagatatcttctggtgacaagcgggtgagggctgctcagggcagaagcaggagactctgctacctgtccctgggccctaggtttctgggtcacaacttcttttgtgctttaaacagagcagttccatctctgggcttcttttgctgtggtgggctccatagtttatgtggctctggggactggtggttgctgattcccttagggagcggcagcacggaagagtggttcttttactgtgcccccgcccccaccctcagcctaggggtatgtttctcccagcctcttgtccaacttcacaccccatttatatgctgttgagaacccagtctccagggagccagaggcccccactcccagtctctctcagctaagctctctaagctggcctgggttctgagctacatggaaggcagagttctcaagcccttgttttatagtttcccccgaaaccccttgtaagggtctgagacaatacaagtcagactcttgagacagcacatctcagcctgaatctctcaccacctgcctggtgcctttgttcccagcatggtggctcctccccagcccacttcctcccaggcctcagatataggtctccttggcacaaggcgccaccacctcatttggcagccagcactgactgacctgtgctgtgagtcttggagacactccatgcatggccctgcctcttttctgctgttctcagggactttgcctcagtttccccttgtgatctttctgtgggttagcccatgctggggtaggggtggtgacaggggtgagaggcttaaataaaggctgttttgaagcccagcatgggccgtggctgtttctagctttgggaatgtggtggggaggcaagtgggcgttctgcactgagggagagacttgttggtctggggtcctaggctttcttttatggcagacctgagggacttctgccccccccccccgactcaacaccactcaatactgtgctccttagaggcgtctatgccagtgaagagaaatggagaccctccaggcccg

SEQ ID NO: 34977 - DNA, 1102 bp, Mus musculus
cttaagttatgagcctcgtctatcttactgcataccctttgttttcaagacagagcttgtgtgcgtgagtgcgtgcgcgcgtgcgcgcaagagcgcctgtgtacctgtatgtgctgttctgtcgtcactcgcccctcctcctcagtttgcatttggttattatcactcttgtgtgagcatctttctcaactctccctaggtgcatgttctccatcccagatcctctgtgatctgctgtctaccctctacgagtgtgtttcccagaagtgctggagcaaacgctgcttggatgcgcagtctgtgggcaggccctcgaatgacaatacacttctgttgattctaagtctgaattgccagtattctgtatgtaatccaaggctgtgagcacttgcattttggcaacagggtaacaagttttccttgaggatcttcataccaaaatgggatgtgaaagaacccccgtagccccgtggggtgtggagctggcagaggtcgttccgttccaccgaaagaaaagaaggaaggaaggaaggaaagaaagaatcggttatcctaaagttaacagtacagcacagcccacatgtggatccataccaaatctatctgataaatagttgaaactcaaaaataaccttagttattttggttttctgtctccgagtatacttcctttcttagccgtgttcttttttccttcacctttagtgaaagcatgacataggaagcctttttttttttaaattcaagaaccaattggtctcacctactctcaatagcagaatatgtaaatatattaaaatttgtttcaggaggtgattaagggtcaaaggaaggaaaaaatacttctcatacttgagagtccgcagagaagaaagcatgctctgacagtgggagatagatggcaactgatggaggatgcaggtgtaactgcagagagccagggcacaccatcaccagctcctgcactggcttttatgtcccaccttcatgttttcagagttgtggaaggaccatctttgtgtgtggtaaacttgttttcaagccttgcatccataacagaaggaccggtaggtattaatccaggtagaagtcatgatgactg

SEQ ID NO: 34978 - DNA, 1179 bp, Mus musculus
tatgtaagaacttttgttggtgtttgagagagggtctccctgctttcccttccttggtgctaagattacatgtgggagctactgcctccagctcagacttttttttttaattcttaaaatgtaaacaaagctagtgaatatataaataacagaccatgtgtgccccagagcctaaagtatttcctgtctgcttcttatagaaatgtttcttgattcttgtcattaatattaaacatttcagtttgaggaattgctaagtattaagaaaaagttttgagtacttttagagaaagtggggtgttgtttaggttagggtctaatacatcccaggttggcctggcattccatatgaagcagagtatgaccttgaattcttttttctttttaaagatttatttgttttatttatatgagtacattttagctgtcttcacatatatcattagagctcattacagatggttgtgagccaccatgtggttgctgggaattgaactcaggacctctggaagaacaattaatgctcttaaccaccgagccttctctccagcctaaccttgagttcttgatccttctgttgctacctctccctgaattaggggcatatgccatcagtcttttggagatttttttttgttagattttttttagtttattctttgagaaattcctatgtgtatacaatatattgggtcacatttaccctcttctccttcagctctccttggaccctccttagtatgcccctcctaacttcaggttctttttgtcagtttgtttgtttataatccactaaatctaattagtatttgtgcatggtgtggggccatattttgagagcattactgaaattctatcactgatagaggaagtatttggttttagttactttcacagaatttcccagaataaatgaagatacagaaggtattttcatatatgaattttattattatatttttgtgtgtgtccacttctgcatgcatacgtgacagcttatttacgaggttagagagttggttttctctaccatgcacattctcatgatcaaattaggctagaaggcaaatgcccttacatgctgagccatctttccagcctgacaaacagcatgaatacaccattttattatttttttaaaaattggctttagagctgggtggtgatgacacacgcctt

SEQ ID NO: 34979 - DNA, 1099 bp, Mus musculus
gtcattcattccagccgcgtgtgatctgacagtgcaagctgttagagcggtgctgggcatgctgggatggagcgttaggagcagtgagtttagcctgcactgcctggtacttgagtgttgctccccattgccaggtgaggcctccctcagagccagcctcagccttgttaaacaaggtgcagctcacacagctcacacagctcgcccatggtgggatttccttctaagcacccgccttctgggagccacagagccctcacacaacgcatgcgcctctggtgtcacctgcagtgcattgctcattcacagcacactaggctagctctcacttcccctaaaagctgcaagttaaaaactcatccccaaaacctctgaacttactatctgtgggtttcatggacagactaaaggtggggggtgggggttttgttggtttgctgtttaagtggtctgcttgttgttgtctttcctttgtttggtctctgatggtttgggagttcttgcagttagtcacaactgagaaagcttggagcaggctctagaaacagagactcatttacctgggtcatcattggctatggctggagagctcagctactaaaacaaagaagtagggtttcataaaagagatagccgtgtgtaagtgcatgtttgatgctgcagtgagttggtcacttataaataagacacctgcagatcatgtgtgcactcataaatgcatgtggatgtgtgtaagaaacacccctgaggaaggcagcactgtcatgaggacaaggcgcgtgagtgggcacttaccactgtgctaccctacctttataattaacaaatatattttttaaaagatttatttatttattatttatatgagtatactgaagctgtctacagacacacactagaagagggcatcagatcccattacagatggttgtgagccaccatgtggttgctgggaattgaactcaggacctctggaagagcagtcagtgctcttaaccgctgagccatctccccagcccaacaaatatatttttaagaaataaagaaaaacatactcacaggaagcaccgtcctgtacttaattttctcttgtactcac

SEQ ID NO: 34980 - DNA, 1148 bp, Mus musculus
aatttctgtgtcttatttgaaataacatttgccacctaaaacacaggtaatggtaccacgtgtcattttcacattgcttactccactaagacctgttaccagtgatgtctgggtgatttttctggtgtagtgtgtgtgtgtgtatgtgtgtgtgtgtgtgtgtgtgtgtgtgttcccatttccctttagttttactacttcttagatgggagccataatttagctacacatacaatgtaaactaatcctcttttatttatatgctttgtaaaaggttgcatttttttttttttatctagctgctctttccagagtgtggggccagggtgatggatgtatttcctgttgttgaaagccaaggtttgagtgtacttgcatttgaataggttttggcctgctttcagagaaaaaaccaaaaactttgtaataaatttgtcattcgaatttgggtggcctaggatgccatttcttcagtcttacatggtatgcatgtgctctttttgaaaacaaaccatgtcaatatgaagtcagtcactggagcttttctgatcccttttagatgtgaagccctccaacatgcttgtaaacacaggcggacaggtcaagctgtgtgactttggcgtgagcacacaggtaggtcttttttctcttcagcctgccctgtggattgaaaatcacctagcttacaaacaaacagggactgtgagtccgctcattggccggcaggcgttattcatttttaatctctgagcagtttccttcatcagaatatgattgttcattgtttaatgacagtaaaaactgctgatattgtaattactacttacgaatagcaaacttcattgctatgcagcttggctgcaaaagcgctctggccagacaaaagggaggacatcgagggagccgtgtctggggagcccaactggcccacaataaaaattaatattgggagcaacaatggtggagggccattacaatgtgctgcaccaattttaattaatttccattttgggcctcccctgaggaccccagtgatagtgacccatgcgcgtgctgtgatgttgatttgaatctcggccacctttcctcccagccaaacacgaagaccaaagcgaaggtcatctttgcattatgagttgtcaaagtct

SEQ ID NO: 34981 - DNA, 1197 bp, Mus musculus
ccaggaaacactagtctattttctgactgtatagattcaccttttctgggcaaaaatagagtcatgtaacatgaactgttgtgccttattctctctagttcctgtatcgtttttagttgatctatgttgtaacatttgtcagccatccactcctttttattgcagaagactattgatataccatatgggcataccatcatttatctattcatttcctaatagagggagggacattcataattgtgcatggcttgagattgttaggagtaatgttgctgctatttgtacacgtcttttttccttccttttctgtttgtttatgttggtggttttcatttttaaggtaggttctcaccagcgcttgttttgtagcccaggctggctgcatacttgaggctgacctcctaccgtagccttccaagtgtcagaattgtagacatgtgccaccctgtgcaacatgcatgcctttctaaggttctgtttggttttgttgaacagtcaccagggagtggaattagtatctgtttttaaatctctgcaatcactgccgttcagacagcctcggagcttaagaacttggtgtttgccactactgtacagtgtgcagtcagtgccactacctagggtttcatgctttgttaaagatagggtagcattgtggccaagatactccatggtcactaacaaggggcagggctgagacaggatctcacagttatccaagctggatttaaactcctaggctctagccatcttcctacctcaggtttctgagtaggtaggactacctgatttaataaccatatggcttatgtttaattttgaaagatactttagtttctattcagttatagacctctgtagaccaggggactgctgtggtcatcaacatgacccaagatccgatttgtaaattcttctattcctcctgttccaggtaatttttttcagttgtctaagcacttcacattattgatcagaagtgctgacagccatccatcactcctgcagatcacattgatgacatcatcatttaaaaaaaagtccagcccgtcgggaagccccgtctcattgagggactggggaaatattttgatgacagaatattatgatgtgactagataattgttggctcctctgtgaccccagcgaacagtacctgccattcttgaagaagcttgctttgagctggagttg

SEQ ID NO: 34982 - DNA, 1134 bp, Mus musculus
actttctgctagcatacaacctcatgtctaaagtatcattactcttatatgtcctcaatttttgtggggagaatgagtaaataggatgaggtttctggaaagtaccatatgcaaatgaagtaattctctgtgttggaactatataacaattatttgctgaaaattcaagaaggatgtagaatagtgtgatgtttaaagaagatttgtttattttgtgtatacaagtgctccattttcatgcacaccagaagaggaaatcagatcccattacagatggttgtgagtcaccatgtggtagctgggaattgaactcaggtcctctggaagggcagccaatgctcttaaccactgagccatctctccagcaacatttttgtttttatagtcaccagttttgggttagtcaacattgagttcattccacaaatatgttaaatatttaggggggttttgcagtcatgcaaatagtttgaactttataagattctctattagatatcgatttttaaagaaagattaggtgaagtcatgatatatttgatatgcagaatagctaggaggactattgaagggaggtagggagctgcagcagaactgtcattttcaaagtaaagttttaaaagcaatggagccctttttcagacaaaatctgtcacagaattctaacatataaagaaaattataaacacaatgtgtttatttctaaacatttataaaattaattttttaatagtagtttcataggtaaagtggcaccacaacagaatcacagctagtttgttgccttggttttgctgttcttgagtagggaggggagcactgggctttcagcactggtttgttgctgttgttttgtattgcaaaacagtgacaattaaactgccatttcgtttcctggattttctgctttggctctatattattcagaaaaatcctgatctttccagaaaaactaactttttaaaataaaagtagaattttttttttaatgatttaccttaaaggtgagcaatgcttctgttatttatatttttaaatggcagcagaagactaattatgagaactacacaaaattaacctaacatcagattaacaagtggtcagtttgcatatatacatatatatatatataac

SEQ ID NO: 34983 - DNA, 2007 bp, Mus musculus
taatgacttagccttaatccgctcatcctcttagcgtgcagtaagtgcaaagtggttaggaatttctgcagtcatctacttcccatggaggacttacataataaaattaatataccctcattctttcttttctctttgctctttcctgggtatttatcaaggtagcttccactcccctcccacccccactactgtctaatctagagctaatgaattttgtgtagcccagtgttaacagcacttgacaagtactggaagggcctgcagaattgcaaaacagaaaaaagaaggaaagccagtgatttaaataaggtcaccattgcctttgtaataatcattagagaagaaactctcccagtaattgtggggctctttagatccattgtagacggggaagcagccgaggccctgggtcatctggccctgggtcgtctcattaaataaactggccagtgtatcgggttctgtgccttccatggagtcactgtgttgtctatttagatatccttgggacagaagatgctgttgtggaagcaacttccagcgatgctgtgaggttttacccctggaccatcgataacaagtactattccgcagagatcaacctgtgcgtggtgccaagcaagttcctggtcactgctgagattgccgagtcagtccaggcgtttgtagtttactttgacagcacacaggtaagctctgtgatgccttcagtcagacattgtcatagctttctgcttctcctctgtgttctctgagttcctcagtgtgtctctttatttttgttcatttccaccccatagaaatcaggtcttgacagcgtctcctcgtggctccctctggcagaagcatggctagctgaggtgatgatcctggtctgtgatagagtgtgtgacgatggtgagaccttcctgcagatctgttttaaggtttatttactttgtgtgtatgcggacaccgttgctgtcttcaggacacaccagaagagggcctcggatcccattacagatggttgtgagccaccatgtggtcgctgggaattgaactcaggacctctggaagaacagtctctctggcccaatcttcctgcagatttacctttccatgaagatgggtccatccatgtgctctgctcaccgttactctctgatactcccacagtggccacgttagttgttttcagcatactttgaggctgcggtcattttcgttctgtagctttattttagatgcctttacaatgccattgacattcgggggaaacgttgaggtctgagtgtgttgaaggtcagttacttaacattcttttgtgtgttgttttaggaataaaccgacaacaggctcaagagtggtgcatcaaacatggctttgagttggtggaactcaacccagaggagctgcccgaggaggacggtgagtgtactgtctggagagagcagaacattggcttgacgtctaagattgtggtctaacctagggtgatcacagcaagagcctacaaatactaattttctccggcagtttgaaaagctttgagcaggacccattgctatgctgtgaccctcccagctctgccataggttttttgtttgtttgtttgtttgtttgtttgttttgctttggtttttttttttgttttgttttttgttttttttttcgagacagggtttctctgtatagccctggctgtcctggaactgtaggctaggctggcctcgaactcagaaatctgcctgtctctgcctcccgagtgctgggattaaaggcgtgcaccaccactgcctggcagctctgccatagtttgttcgatggattccatggcccattttagaacttttgaaaatgcaggtgtgtgcttaaataaatgaaagtaagaggtcactgctgaaaaccattgtcacctccctgttttctctactgccagccaaggatgatgaggcctgtgtgtgtgtgtggagtttatgttcctctttttaaattcatagcgagctaaggctgaatttctag

SEQ ID NO: 34984 - DNA, 2279 bp, Mus musculus
agtctgggtcaaaggctgctcgggggtttaatgtgtgtggttggaggggaaaagtgtagaagtgtagaccttagtcagtttggatgtggcatatgaagtgagctgaaggttagctgttaccaactaacctgacctttgtcacatgcttccctccacaggtggccaaagccttctggatggcaataggaggggaccgagatgagatcgagggcctttcttctgatgacgagcactaagctcttcctgctaggtttgactgactccagtgccagcaccgtgctccccaagtgcttcccttctcaacggggttctcttctgccaagattgccactagcacgctggccacctgactggtttttggggtcccttacctgagcttttagaaaggcgttagggagaaatctttgttcctgccgcataagtgactgaggagtgaaatgacagtgtggaaacccttcagatctacagtcttcgttttaagaacctgggtaaaatgaggctcggaaatgtgtaatacaggagaaccaagtgtcagagagcacactgtgacctcagcactgagggtctgaggccagcctgggctccatggggagttctgctgctgtgctcgattgccccgttcattctgtctgcaggtccggagcttgtgctatcggctgtgtactgtcactggtccccgccaagagcacagctctgacctaaggtgaatgctggtgacaagaaaggcagctgtagatgtaggatgtgcctaggggatagggaacaggtggctcatgggtttgtctcttagtaagtccttagtaagttcagtgtctgagttcctgccacaaagcagcaaaagccaggtgtgtctctataagaaacagaggtgaaagtttcctcctctggggaatgtaaactcccctctccccactgctgggcaagggccctgagtgccctcctgaggacccagggagcagcagtgttggttctgagcacactgctgacactggcagctgtgctcttcgaccactgagtgttctccctggcaatgtgaggtttcagagcaggtctccccttctttctgcttggaagccagaggttgctgtcaaggcaccagttccaagcagtggggggataggtgagcctcccgacagccaggtcctgagccaccatcatggttcacttccagggctattggcttctccatactccagggcccagccccaggggagcacagagcaaagttctaaaggaaaagaggggaaaaggtctaaaagtgcgtagtctgtcatcacagacacttctgtgaggcaggcttgagtcccctgcattgtcatgggtctctaaggatatgcagccatgtacatggtactcatcgtgggctgagagctggcctgacttagtgtcaaccatgacttaggtcatgaccagaaacaagacgcgcctgcttgggtaccacttacaggacctgaaacatgcttagccaggccagaaccaacccagggaggaggcatgatcctggtgatggtggtattctagaaacagtgggtgctgctttgctccgggttcctgggttcccactccccacattctgatcttgtaagctttgagcttgggtttaccaccagcctttcagggggactaatactttaatgtgagtgcattcgctactggttaagaagggaaattagggaagtcggctgtgggttgccagaaaggtagaacttgtttttcttaaaatatggaagattttagaaaatatattaggtcacatgattagggaaaaaatagactagaaaaggctgtggacttgattttgctgactaaacaaacccaagtaattaaaagatgacttatttataaagtctgctaatgtgttttgttctgtttgggaagaggtgtgagttggtggaagcctggtgtcttttgtagtagacatacagtccgaagagtttgttgcctgtaatgtttcagaatctactttgcctatatattcctgagctggtgctgtggtgataggtgttgtctaacttatgtgcacataagttagagttccggggggactgaaggtaagaaactggttttctgccttaaatacttcttgtttctgtaacaaagtgcttggcacatagtaggtccacaatttttgttgacaagtacaatctgcttggtggaaatgatcacagagtctgaagatccatgagttctagaaatgagagagagagagagagaatatgaatatgagagtcaaatttttcttccctgaaacaatcatattatgtaatgatttcaaagtg

SEQ ID NO: 34985 - DNA, 1229 bp, Mus musculus
tccccaacttgcttctcagagctgggatgtattccagagcctgatgtttttattcaaaccacagaaaagttttctttaagtagcctgtgcagtcatgcatgtgcctgagttgtctggagcagaggcaaacatctgacttcattcttagccccaagctgccatttctgagtccttgagaggctgagaaggctctagctttgtactgtattcttactgtgtgactagatgcgtgagcgctttacattagaaggaacctggttagagctcgctcctcctgtctttgtgtggcatttgtgttccattaccggcccctttaagtaacggccttcacagcaccttcccagtgggtagaaagccacacaccaggatgtgggtcaaccatgaagatgtggcattgcagacgggggaacatgtggatgcatggctatcgccctgaacagtccctgcagctacttgtgttaacacagaactgatgtttagcattctgccgctttcgtatttatgtaacaattccttaaagccattcaaatggctaactatttaatttctttaggacagttgtaaaggtctctctcctgaggacaatgacttggaagaactggggcacagccagtcccagacactggtggaggctgcagtgactttttttggctcaagatccacaagcattagagtagactgggccaacaagtcaacaagtggtggcgtgtgcaaacgggctgccctagtcaagcccagtcccttcaacagtatgtctgatgcaccacaggccctccctactggaagtgggaacttcaaatggaaattggagccatcttttatcccagaagcctttgctgctgccagggcaagtgggctggtgtggactcttgtttaggaggctgaggttcttgtcactccttagccagccaggcctttagtgtctttgtaaaaagcatgtatttatagtgttttagatttttctaacttttgtatcttacagcattgtaccccattgttaaagagccgtgtcccctcttcttataaacgcccttctaataaacttttcaccgtaaagctcctgagacaggagcacagtctgattccctgctgctgtctctggggaaagggatttacaaggggaccccagcaggtcctgggggcttcagagctcagcaggtgctgataccacaacactgaagtaatacctgcccttaacaagggtaccctataggacgccctgggttccc

SEQ ID NO: 34986 - DNA, 1283 bp, Mus musculus
acctagctatggtaaaggattgccacagcaaactgtgacactgtgtaatgagcactgttcccagcggcaattacagagaaaacgagtgtaaattatttcaactggaaaaaagtccctttcttggctgttttagaacagggtacacaggatcgccacctgcaactggtactcgcttcttggctgctgcttctgttgtgaaaagacgagcccatgtttctgcatggatttcccatggaagtcctgtcctgctacagaggggaagaaagtgtaccctccaatgtgataaatcttctgatgcccccagactcttggagcacatcctggtgcccctcctgcaggagcctgtggcatatttccagctgggcatgctgatcctccttgagacacagatgcctgtgtgagtctccgttgatacaattctgaacccctcaggttctctgaaagggcacagaccatgggcgtgaacattgtgccgtacctgagatggtctgtggactgctgcttcagacacacgagtcctcggaactgcctggctgcctgtcacgcatgctctgagtcagaacacaccaacgctctgctgtggctcctagggaagcattcatggtcctctgttatcagcaggggtttatgtcacttgctgtccggtttcctaggggcttcctgtgccccttccccagctatcctccaggtggctagggacagtctattctgctgcaactggaaagtagagggaaccggcactgctcagagcagatggcggcttctggaggcacacagtgggagtacaccccttcatgttattggccagttgctggagaatgctgtaggagaaaattctaggcaggtctactcttggcatccctgagagtcaaaggcttggagtctaggaaaggtcacaccatgatggagaacacaggtcatttgggtacgtgtaatcaaagtgccctcccaaatcagttctccttttcgtatgaacagcatctctacttttaaagaggagttgaggatcgagaagatgacagtgcagcagtgggtgtggcctgactacatgtgctgttccagccctgggtgcccactgacaccgacccccaggcagaggcctttgtcttcagcactcctgagaagttggctctttaccccttctcctctgctgcccctccttcctgctggttcaggtagccccagccacgtgggttagagtcctgtgctggcctgccatggcagctggctaccttccagaccaactgtagagatacctggcattttgaagaaagcctagactg

SEQ ID NO: 34987 - DNA, 1211 bp, Mus musculus
actgagccagacctgctctcaatgggtcgggagggcccagactagcccggcttctgtgctttgacctcaagtcctatggttataccccctgtgcagatctttgcccatcgcctgcttcagttcaggggaaagttgatgtgcccccctctcctcccctctgcttctgccaactggaatcttttgcacatgtttttaataggcaccccttaatccgagtgtcgccttctgggttttattctgttttcctttccttaaacaaaacagagagcctgtgccagcttggagcagggcttggaactgaagccagccaatgtgttaggctggcctggggccagtggagaattgagtgccccatgccatttgagaagcctgcctgacaccatgctggtagaggtgggggccctgatggctggggctggaggcttcatgtctccagcattttggttctgggagggtattagcagggactgggcaggctagttgaaactgggctatgtggagtcaaaaatctaatcgaacactccaggtgattggaagccttggtcgacagagcaaactcgtgctcctcagagaatcagctgatgcagtgttgctctgagaggagtcttgagtagcaggtcttcagggtcggtgtaaactgcatcggcatctgttgggaaactttgaaacctggggcgtgctcactccagggaatggcaaggtggccggagcagctaagcccatgttggctggatctcgaagcacactttgttcaaaccttggtagatccgaaagcagagagtggaaccagaactcagggaaggctgtaacccccaaggcctgcttccaaagggacctacatctgccagcttggccctgtgtcacaaaggtttcataacctccttagacagtaccaccagctggggaccaagtattcgaacgtatgagcttatagggtgcattacaggaccaaaccacaactatggcccctttctgttcggtcttttaggaagctcagagtcgagctgtcagtatctgataccacatacttataccagtggtagttctcctctcgccagagtcgtgacttttgcaagaaaagaattgcatatggggcaggggcagggctaccactataggaagatagagtaattatacttttttgctttgtacctgctatggctggaatgcctgaaggaccatctagggctgatagtggaaatggagggaga

SEQ ID NO: 34988 - DNA, 1212 bp, Mus musculus
tctctccagccccagaaactgtttaaaaaagaaggtgggtcgcttctgagtaacaacacttggagttgacctctggcctcccaccatactcatgtgtacatgtgcatacacgtactcatgtatacatgtactcatgtatacacacatgcaccagtaggaaccacatgtgtggtatatacatgtgtgtgtatgcacacacacaatgactagggggcgagaggaagagaggggagagaggagagacggggacagagagaggagagagagaggaaagggagagagaatctaagaatctagtaccttcagagaaaatgaaatctttgagaagagattagatggtacattttgggaatatttccagaaaagaaagggacttctctgtccttgggagtgtaagatacctttatacccagtcacaccccctggataggctatgccggtcagcaagcaggtcccatagattgagagccttgcctgtgtctgctgaaatagaaagtgtgaagttctgcatatgatttcagctttcatgtggccttgaacccctcactactgtatgcccaagtgaaggcatctgaagagctgggcagacgtccaagggcagccgggaaggctggtagccagatgaccctgactttgacaaaggtgggaacccaagcctggccttaaagagccagaaacttcatcttggaagtctggaaattgagatggctggctcccactgactagcaagaagctgagggacaagtcaaaccaggagtcgaccactgcaaagcacaggtactgtgaatttaccctcgtgtgctacatcatgatgtttggctaaggagaagctgtatgcataacagctgtcctcaaagattataatggagctgaaaagaagtcccatcattggttatgttatggctgtcatagcacactctcgagcacacacacacatgtcaggtgatatagatgtggaaacacctgagtctcatgcctgtagaataaaaacagagcacatacaatcctacccagagaataatagtgttctaccggtttacatatttattatatttttattattttagaacatacttcctaatgatttggagcctcatttgtgaggtttgggaacagggatgctggcttccacagaccagcaagtatctgaaacaccaatcaagccatgattacaaatcagaccacaagctttttcactgaggtgcactggag

SEQ ID NO: 34989 - DNA, 1794 bp, Mus musculus
aatccactatcctatgctcaggctggcctggctctttctagtgattctcctgcttcagcctctgagtgctgagatgggaggcaggtgccaccatgtccagctcatggactctatgctatgcacacactatgatgccagtgtgcctgttgtcctgggctggaggtcccaggccttgtgcacacgggttcttgctagatcctggatctaatcacaggctagttgactgaagagaactcacagacaaatgagtatttgcttgatctaaagaactgctggcggtggcaacggcaccattacagttaagggcattacaggctacccttaacttgcccttgggggagcattttggggggagtacattgcattcactcttaggagcttttgcacagcctaggatagaagcctgggcagctctgatttgagtatcagccaggtctgttgtccttgtggctgttaggagtgtgggctatgtggaggctgaaatcctggatcggtcgggtccttctgtttactctttgcttattctagagcaggtcgtcaaagtctttggaagccccagtttccctatataaaatgaagataatggtaactaccaccgagggtggtcacgaggatgaaccaggtcaccaggtctgtcccttcctccgtaaaacctcagtttccttatctgtgagatggggtgaggatgggtaggcccaccttacagggtgagactgagccgacattatgtaagtagttgctgcagtcgtggggaagaaggctgaggaaaaagatggcgttgtgctggtgtgcactcagagccccagctccaagttttaacttctgagcctctgaatgtgtctgaggggctgctatcccagccccctaagcagctctccaagctgttctttagaaactgctagaatgaagacaaatagcagcggttgaaacatgacgctctagagtcatctgagatctcagcctctgtccctgtcagtgccttgaactgtccctccctcaggaaagcctcagtttctttatctgtggaatggagtgaggatgggtaagccttcctcatggggtgagatttagctgactatgtggagagaaagccttcaggggagctgggatacgagagggatgaatgcgcatcaggtacatgggcaggagagattgcttagttggtaaagtacgtgtcacacaaggtcgaggaccggagtttgatccctagagctctcctaagaagacaggtgtggggctgtgcacttgaaatcccagcactggagaagtggaaacagccagccagcctcgccccaggccagtgccattgagagagcctgtcttagaagacacagtagataagctcctgggagaccacacctggtattgacctctgatatctatatctgcatatatgtgtacacacacacacacacacacacacacacacaccatgaaccatacaacatacaaaagtagttaaaaaaataaagtatatatgaaaataccataataaagcttattgatttaaaaaagcatatctgaataccgatactgggaactctgtgataaaccttcagtatctcaaattagttgcagcacccgggaggtgaggcagtgctaggactgcctggcttcccctgatcaggtcaggaaggaaggaagaaggaggagggagagagaaagctgatgggtttggccttgtcccctggcccgagccacaatggcaggttttggggcctcaggaagggaacagccctgtggttgcagggccagcgtcagctgtggggagggagcggccagagtgagtagcgg

SEQ ID NO: 34990 - DNA, 1206 bp, Mus musculus
aactgggcagatgctctgctgacggtggtaatatgttgggactatgagttggcagggctaattggagctggttccccataggacacaagggagatacttgtgactatttccttgccttccatagcctctgggaccaatggaaggcttgactggcatactttagtgaggctggttagtgccatcctattggaggtcttcctcagtggccgaggataccacggctcagagatggcaagcatttcacctggggtgagtcaggcgaagaatctgacccccgatcacgttatttctggtcctcagctattcaggcacctccccttcagtgttccaagctctggcccatccatcctttggcaaggctttggacaccaaaaccttttgaggcagcctacacactggcttatggggatgggcctagaaaagccatcctgagccctggacaggttagggcatgcaacttcagaccttggcactatctgaattgtagtcagaggtgacattaagatgtgaggtgaagatgacattcattgtgactcccgctcagcctgcacctggagtcaatcaggcactgtcccctcagctgctgtccttggacaaggttgcaggtatttacctggctgccttctaaggccgactcagcatagaagcctcatgcttggctcaaaattgctgcccttcggagagggccgtggcagggtggggcgatgtgatagcggggaggccagggcctgctctagcaggtcctaatgactctaaataaccatgttacaggcagggccttgaacttaataaacacacgttacttctcatgcagccacaaccatcagagctcgtaattacctgcgatctgccgcagcacaggctgcactagagcaggcagggatgtgaccacatgtctctattgcagccctcaggacccatgcttcaaccttttttaaaaatcttagcaggttgtggctgccttggttggccacagcaatgtggactcagagttgctgtcattttctctgcagttaagtatctgtgtgttttgaccatacctggtagctccaacttctgagacggcagaggtacttcgtgtaggagatacttggtgtgtggtggcaggtccagaggaatcaccctgaacctggctggctgagtagaccaaaggcaggtcatgtgacttctttgagccttgattccctccattaggaaagtatttta

SEQ ID NO: 34991 - DNA, 1221 bp, Mus musculus
gtaccttcagcctgtgcgtagacctcgggctttggaagcagggtgtgtgtttgccggttctttggcagcactgcggactgaacccagggcttcctgcatgttgggccaacgctctgctactgagctaccctcccagtcctgggattgttttctttcatcttttctcaactagagagacccggttgcttgggtggatccagacaaaggtggatttccatccctggattttgtgcccacgcctctgggtcaccctgtctcccttggcaacagctgctgctgttttggccatgggcagaaagctaaaggccacgtcttggggaggcgactagttggctatgtgctcgtgctagccctgtgtctgctaagcccctatgtgctcgtgctagccctgtgtctgctaagccccgggcttgtgtgttgcttgtcacattgctgcctttgagaactagggctttggaaagcagacaaaggaaagtgtgtgacttagtcacccgcttcgagtggggcgggacactgggtgcctcagtacattctgtcagatctggagccgggctgtgaggactctccgtctgagatgtggaaccttttggctgtggtagctattggccacatgctggcttcttctttcccccgggctctaggcacattcagtgaccgggagagctggagtgccccaggcttgcttgccttcacagagatgaggtgtaggagtttcattttaagccacagagtggagagcagggcatctctgatctggcaggggtggggcagagctcaggcaagttccatgccagcagcccactcccacctgcttgagcggctgagaggagacacaggtgtctccctctctagttcctaaagggaagttgaagcacctgcctttgagagagacaggcctgccgcgggggagagccagtattggaccaagctgaaggcatctctggtttagaagggatcttgggcattgttgcatagcaccaaatccagagagggggaaaaaaaaatcaagaagtgaagtaggtcttacaggaagcaccccaccaccacctttgtccactccctttgtagtatgacctcctcctggggccaccagggactttgctaggctaccctcaactggtagggagaggaagagtatcttcattgtaacagctttctccagcttctggggacagaaacaccaaggcttttgacaatgccaggtaggtctctggccaacct

SEQ ID NO: 34992 - DNA, 1196 bp, Mus musculus
ttggggtaaagtcctggactgaggggtctgaatcacattccagtttggcctctgtgaaccttgggcaggtcatgatgaccttgcagatggggtcttctaagattgctacacttgcttggtagattgtgcttgttggtgtttatctctcctagttgttgtaaaattatagtggacaggagctggatgtggttcatatctttgtgtcccaggggctagcacacagtaggcactctggtttgcatactgtagattcatcatcctatgtggggcggaatgagatggtaaagatgcttgttgccaaacttgaagaggtttgattctcagtgcgctctcaccgcgccccccccccccattaaaacgtattttttgagagagagaaattcccactgtgtgctaaattatttggcagcctggcacacagtggttgctcacatactggttgatcttggaaaactttgcccagcctccccccctctcccccagcaataaccttgccatatcctatgcttgcgttgcagatgccagcatgtctccggatgccaccaagccgagccactggtgcagcgtggcgtactgggagcaccggacacgcgtgggccgcctctatgcggtgtacgaccaggctgtcagcattttctacgacctacctcagggcagcggcttctgcctgggccagctcaacctggagcagcgcagtgagtcggtgcggcgcacgcgcagcaagatcggttttggcatactgctcagcaaggagccagacggcgtgtgggcctacaaccggggcgagcaccccatcttcgtcaactccccgacgctggatgcgcccggaggccgcgccctggtcgtgcgcaaggtgccaccgggttactccatcaaggtgttcgactttgagcgctcagggctgctgcagcacgcagacgccgctcacggcccctacgacccgcacagtgtgcgcatcagcttcgccaagggctggggaccctgctactcgcgacagttcatcacctcctgcccctgttggctggagatcctactcaacaaccacagatagcaatgcggctgccactgtgccgcagcgtcccccaacctctggggggccagcgcccagagacaccaccccagggacaacctcgccctccccccagatatcatctacctagatttaatataaagttttatatattatatggaaatat

SEQ ID NO: 34993 - DNA, 1614 bp, Mus musculus
aaaaaaactttgtttggtttgccaccatagcgtggtattgcagagtccctttgctagccacaatgcagtacctgtcactcatagtctccctcaggaggcacatgtcctgcccacttgctgctcacctgcttagctaatagtctgaagcctgaaaggggtttagactgatagtgtccataagatatggcagtgctcagtgacagtcatttgtacattaaagtaatttttccagaaaatgaaaaatcatcaagttataaatctatacacatgttcctaattttgaaaaatgaggtgtgtgaatgataggtagcaaatattaactctgacttcaggagagttgagactacaggtttctttcattttatttatgcttatttttattttcttaaatcacagcacaaaacaaaaagggggaaaagagtgagttaattttcagagcctgaaaaatagacatcacgtgaacttctgcagcagaaaagaagagtgatcctgaagagatgctttgacagatgaaggtggagaggagatcccgtctcagccacgtctcctgaggagaagtgtcagcatcagggcagcagtgaggatggagagggcgcagactgtggggaccacaatctctgaagccacgtgcatgtgcctaagcaagggctctgaaagggacagatacatccaccagaagtgagctgtgttttgaaacaaaagctaaaggagatgggccactgcgtttctaatttttcttatttgttgtaaaagtgaaccagtaaatcaaacattattttgaaatggagttttggagccatgggacaaaggcatcatgttcacttggtatgcacacagcttttgggaatccttaccatcacacaaaacttacatcagtgctggaaatgtaacagaaaatctggggatgcctgactttggttatttccctggtattttattaagcttgagtatggttaatatttatgctggcgttgcattaatctcaaaagattagcacctatattccatggattctctcggctttagtccaaatatttttaactgggcatggcagtacacacctttaatcccagcactgaggaggcagaggcggcctggtctacagagcaagttccagaaaaaccacagctacacagagaaaccctgtctcaaaaggaaagacaaaaagaatccctgggaaacattttcagctttttcagtttgttattctcaatatacttatatcctcatatattacaatttctaatggtaattctaatacttatttctttgtaaacacaaaaattcactaaaatgttaaattatttgataattgttgcctggtttaatctttgagagcaaagtgttatatccaccaatccaatggaagaccttcatgggactgatttgtctgctgagccctctggtaacaggtaaacaggcatggatatgttctcatgcagctcacaggctggtcagcaaatgctcattacaaccatgttgcagttacttacatttggtgagttatggtttataatctgtagactatggcctacttatttatgcatgtggggacactggtgcatggacatacaaagtacaaaaggtagctcaggtgagggggtttctgcacca

SEQ ID NO: 34994 - DNA, 1101 bp, Mus musculus
ttactgagtaccaccacacttggtttgcacagtgtttctctattactgcttatttatatatatgatttatttttcgtttatgttcattagtgttttgcctgcatgtatggctgtgtgagggtgtcaaaagccctggaattggattagagatatgtgagctgaatgtgggtgctgggaattaaacccttctcttctggaaagagcatccagtattcttaactcctgagccatctctccagccctagactattactgcttttaaaaaaaattgtttttctttgacatgtgtgtatgtttttctctccccctttcttgactgtacttctccagctcagggattgtggcctatttatatccgtactcagtgcttgtcacacgtggatttcactggatgacaggaaggaaggaaggaaggaaggaaggaaggaaggaaggaaggaaggaaggaaggaaggaaggaaggaaggaagagctactgtttggttattagtagtttacttattcattttaattttcttttggtatttttttcttcagtgagaagccgcagaaatggagagtggagctcagcaatagtcagaagagggtgaaaacagtgtggcaactgagtgacagctcccctgtagaccattccagtttccacaggcctggtaaagatgctatgtagtcattaaatctttatgggaggaatcattgttgcaggtctttccctgaactgtaggtataaaacagactttaaaagaaaatctgacttttgtgccattgtgagttttagaaaaattcaaagtataataatcacttgtgagtgctttttcttattatcctggataaaaagaacctttgctggggctggctcagtggttaagagcactgactgcttttccagaggtcctgagttcaattcccagcaaccacatggtggctcacaaccatctgtaatgggatctgattctgtcttcaaggcatcaggagcttaaaacaagcagccaattgtacttgctcacagtcaggaagcagagtgcatgggttgctgagttcccttcctccactcacaccatccaatacggtgggtcggcccacgtcacttaacataagaacatc

SEQ ID NO: 34995 - DNA, 1167 bp, Mus musculus
cttccttccttcctttctttgttatctcatgtcctgtagctgataaaaattactctgaagatctggaaaatttaaaaacttcacacaagaaaagacatcacgtgtctgctgtgagtatttgtcttactagctacttacacggtgtttagttgatctgaagtccacgcttaacagctctcttctttctctcactatgactagatgtttctctgtcgtgtcagagtatttgtctttattcttatatcagccagggcagagttatcccctgctctctggggggttggttgtaggaccatgctcagtcctcagatatgggactcacatgctttatatgtgctccctcttttggctaatgtttgtggcttaaaagaattgtcttttttttttttttttctcattttgatgatagggtttttttttcccctttggggacagaagtcaaggtgattttgataatggtttggtttgaagctgatgctgtgctctcctgtgccctgtcttcaggtgacagccagaggctttgcccagtatgagctctttaagtctgacgacttggatgacactgttgccccatcacaaactacagtcacgctggacctttcctggagccctgtggatgagatgctccaaacccctcccctgtcttcaactgcagctctggtaggaatggaccctgtcttctcttaggttgctcaggctcctgagtggcacattacgtgtttcttgctagtgctgtatgtacactttcagccttgacattcactgggtgttaggctgtaccacacagaaaatcttggctgacttccgaggtctcaccagacaactaatggagattgccaagtaagctgagctgtcagtcgcttacagtcctgttactatggagctttacttttaagagatgattgcagtctcttttcctggtgacttaagagaagtcaagccaggcgtggtggcacacgcctttaatcccattactcaggaggcagagccaagaggatctcttgagaatttgaggccagcctagtctacatagttccaagacagccagagctacatcccgagaccctgtcttaaaacaaaacaaacaaacaaaaacctctttaagctctttcctttcttactctctagcccgccttctctcttttccttccccctctctccacgtgg

SEQ ID NO: 34996 - DNA, 1185 bp, Mus musculus
aaggaccttgttcctgaataaacaaggtaaaattgaggactgagtactcgacgctcatatcacagaaacaggttgttccatttgggaaatgaaagatacttacatatctgggcatctcccaagggtctcctgtgatgtttacctttagctcatcaatactgagcttgttacagcacttttcttccatcatcagattctccctttacaggaagcaactacagtctttgagggctgaaagatggctcggtggttcggtggtgaagagcacctgcttctcttgcaaaggactcggtttggtttgcagcatccacatagcagctcactattgcctgtaactctagtgccagtgatcgtaactgctgagccatctctccaaccttctgtgtagttattttctaacacaaaagataattgactcttacatcttattaagtaatctaaaacattttttaaaggttttggagaaggaagaaacaagtcaagttgaagaactgcagtctgaagaaactgctatttctgatctctctgctggtgaaaatattaggccactggccttacctgttgggagagcaaggtaagttaagttggtttttttgtttgttttgttttttgttttttcgagagagtttctctatgtaaccatggctgtcctggaactcactctgtagaccaggctggcctacctctgcctcccaagtgctggaattaaaggtgtgtgccaccacttctcggtagttaagttggttttttgtttgttttgtttttgtaagtgtagagttagggatagagaatgggatttgataggatttgagttggaaacattgttggggctgaggatgtaagttgtgtgtgtgtgtgtgtgtgtgtgtgtgtgtgtgtgtgtgtgtgtgtgtgtgtgtttaaacaagatttctctgtgtaaccctggctctcctagatctcactttgtagataatgctggcctcaaactcacagagatccacctgtctgcttcctgagtgctgggatcaaggtgtaggccaactttccccagcatgcttgtctcacatgagttctggagatggaactcaggttcttaagcttgcaaggcagacactatcaactgagctgtctccctagcccctagcatttcttgtttttttttttttcttcatgcctttcatatcaccctaagattttaagatt

SEQ ID NO: 34997 - DNA, 3262 bp, Mus musculus
acctggcgtcgttggcaccgcagagtgaatacaacccaaaaacgatatgccatctgttctgccctggctgcctcggccttaccagctttggtgatgtctaaaggtctgatgctttgatatgtgacatttagttttaacttgtacctaagtaaattgctttcatgaattctgtttctctctgcctgctaaagtcacttatgcttacatcaacatagtaggctcttatcacattcttataatgttcttgactgtcaaaatgatgaaattccacttaatggtccgtgtttctgaaacgcatgatattagtggaaattctgatttggcgcaaattgcatgatggtttattttgaggtgtggtgcaaagtgagacatctgccactgaaagcagagacagtatcttttgagttctggaacagtgtttctggggggaaagatgagactttgctgttaagtattaaattggttttgttaggtcatcgtattgaggaggttcctgagctgccgctggtggttgaagataaggttgaaggttacaagaagaccaaggaggctgttcagctgctcaagaaactcaaagcttggaatgacatcaaaaaggtaagctcaccatatacactgatcttccatactggcagatttggattcaaaggataagttgaggtttaatgggtgggtggcttcagtttttattggatatagaaacttcctttcaaagagccaaagtagcaaagataggggtggttgcgttaacccaagttccctataggtaacctatccagtgtagatggcgttttgtagtatttaaaggaagatggacatgtaaatacttttttggtgtttcgagacagggtttctctgtgtagccttggctgtcctggaactcactctgtagaccaggctggcctcaaactcaagaaatctgcctgcctctgcctcctgagttctgggattaaaggtgtgtgccaccactgcctggctgtaaatacattggagagaagtcttgctgtcttttggggggggtacagaaagggcttttgggcttgcaatgatgttgtaatttgcgtcttactctgttttcagtgacagttgcctgctgtcagtaagctgaatcagaaggttgacgaaaattattgctgagcagctcaaaactttaactgagatttgagacttgaaatggtaacagaaagttgtgaatttcatggataaaagtgtcaggtgtggctgctgaaagttgctttgcctgctgagacagtttttcgttttgctaagattgaggatgtgggaagtcttgatcagaatactaaagctacttactttataggtctatgcctctcagagaatgagagctggcaagggcaaaatgagaaaccgacggcggatccagcgcagggggccctgcatcatctataatgaagataatggtatcatcaaggccttccgcaacatccctggtaaatccttgcacgtggtttaactgcctattctgtgcaggctcacttagcttggttatgatgaaattccacttcatggtccgtgtttctgaaataacatgatattgtggaagttctgagtcctacgtgagtgagctacgccagccatgatggcttgagcttctaagtgccctaggtagcttgaggagccatagaagttgtatttctcctgttgggcatgcaggcttcctgattctgcttcctcttaaaggtattactctgcttaatgtaagcaagctgaacattttgaaactggctcctggtgggcatgtgggccgtttctgcatctggacggagagtgctttccggaagttggatgagctgtatggcacttggcggaaggctgcttccctcaagagtaactataagtgagttttcccttatttattacacgtcaatgactaatgtgtgcactaacatcctccataagttctgcattcacattttgtttgcgttttccattgtttggatgtgcctcacctgtgattattaaatgaagatgtaaaggtttattctgtatctggagagttgaaacatttaaattaaaatttgtactgctttgtgttcagttagagaatgagactttggacttctctcttccttccccccagcctgcccatgcacaagatgatgaacaccgaccttagcagaatcttgaaaagcccagaaatccaaagagccctccgagcaccacggtagagttttaaaacttaaggtctaacacttgatacgaccccttgactattaaagggatacatgttgattaatgaatgctacctcttgatagcaagaagattcatcgcagagtcttgaagaagaatccactgaagaacctgagaatcatgttgaagctgaacccttacgccaagactatgcgcaggaataccattcttcgccaggccagaaatgtaagtcagtttggcgtgtcaattttttttttttattagattgcccccttccaagacaggaacttactatgaagacgctggcgccccccccccccccaaccacacacacttgtttctacctccccaggtactggggttaaagatgtgaaccacgatgcgctcattgaagataagattcttaattttctatttgtttttgttgcagcacaaacttcgtgtgaaaaagctggaagcagcagctactgcactggcaaccaaatccgagaaggttgttccagagaaggggactgcagacaagaagccagcggtaggcaagaaaggaaagaaggtggatgccaagaagcagaagcctgcagggaaaaaggtggttgccaagaaaccagcagagaagaagcctactacagaagaaaagaagccagctgcataaactattaaaaattgttaaattccagagagcaagtagagaccgcatatttcaataaatcaaacatgtggtgacaaacccttgtgtgactcttaaattgtggatgtttccaagccccttgaaattaaccttttgaagaacaagtggcaagatgtgagacttcatggtcaaacttaggtcatcagaattatagaacaaaattttttaaataaaatttcattctctaggctgctttgttccacatggtagtctactttataaactgaacttgggataaatagctaggggccaagtcctatgaatagtgtgtagttatggtagccactagagggcctatgatggtaaaagggaatggcgggaccaccacagctatggccactgtgtctgtagaggtgcagtgttctttgtatgaatcagtctgatcatcctagaattatcat

SEQ ID NO: 34998 - DNA, 1441 bp, Mus musculus
cggtccccaggccacctcgcttttccttcttggccatttttaacagaatcccctttccttgtttcctgcacaggtacatgctttcatcaaaagatctgacgccgaggaggtagacttcgcaggctggctctgctccaccattgggcttaaccagcccagcacaccaacccacgctgccagcatctgagcctttaggaagcagcaaagaggaattctctgcccagtggcatgccatgttgctttcaggcctctcccatgcttgtctatgttcagacgtgcatctcatctgtgacaaaggatgaagaacacagcatgtgccaaattgtacttgtgtcatttttaatatcattgtctttatcactatggttactcccctaagtggattggctttgtgcttggggctatttgtctgttcatcaaacacatgccaggctgaactacagtgaaaccctagtgacctgggtggtcgttcttactgatgtttgcactgctgttcatcgtgactcactagctggctgcctgtattgtcaggattctcggaccttggtacttcactcttgctggtgacctctcagtctgagagggagccttgtgagacccttcacaggcagtgcatgcatggaaagcatgctttgctgctactgaaatgagcatcagaacgtgtacgtcatggtatttttattttttgcttttggtatagaactcagcaattcccatcaaaaaaacctaagcagagcccatcactgccatgatagctgggcttcagtctgtctactgtggtgatttttagacttctggttgtatttctatatttatttttaaatatacagtgtgggatacttagtggtgtgtgtctctaagtttggattagtgtttctaaattggtggttattttgaatgtcacaaatggattaaagcatcaatgtatcaagagttctatctttcttccagtctaagtaccaatgctattgtaaacaacgtgtatagtgcctacaaattgtatgaaaccccttttaaccactttaatcaagatgtttatcaaatctaatctcttattctaataaaaatactatcaagttaaaataaaagggacaagagatttctgcttttgtggcacacctttcaatttctctagactacaagaaatgaaatgattgtagtggtttaactagatatgacccccatagactcatgtgtttgaatgcttggcccatagggagtggtacttgttggaggaaatttgccacggtggggtgggggtgagttttgaggtctctcatatgcctaggctatgcccagtgaagaacacaacctctgggtcaagatgtagaagtcctggctccttcagtactgtgtctgcctgcatgatgccatgcttcccacgataatggactagacctcttaaactaagccagccccaattaaatgttttctcttataa

SEQ ID NO: 34999 - DNA, 1112 bp, Mus musculus
tcttacactacacttcctgtacacctgagtacctacactcagagggtccagagctaaaacacagccttctataggagagtgaacaggctgaggggaataggtttgttctgtcagagtggtagaatacttgaagtactcccaataaggtgagccaggaggagttagaggtcccaagccactttcctggaactgatgagggcagcagaggccagaggcaaggtgggtgtgatggagaggtgatggagcaggaatcaagagtttctcacatgttgacatgtttgcagcctcctccaaaactgcccagtggagtattcagtctggagtttcaggattttgtgaataaatggtaagtttgtaccatgttctaagactccacccccctccccctgcccttaccctatcccctattaaccttggctgctgccatacctcatatcccttgtgatgctgggactcgtgactatctgattctgggtgccactctcccctgaatttcagggaccatcctgttgctttctgaccttgatttagctcagcaagacttttgtgtgtttggcgtaatgatggtgtgcctataatggggggtgattgcaggcactggccctcagccttcataagaggcaggcagacaaacataagcagggactgggaagtagcactcctaacattatttatcttcttttcagcttaataaagaaccctgcagagagagcagatctgaagcagctcatggtgagtcttacagagcctgtttgttcatctgagccatttttctgctcattcccactccttatacttcagtcaggtttagggtttcacagtgccagggatcaaactcctctgtcctgtgggtttcaggggcacctgcgatgcagtcagggagggacttccccgcagccttagttctgactagttcacctcacatatccagtatcctgagttactctccaactggttctagtttgatggcagtgacacacacgtggtactgtaatgtccagacaaggccatgccctgtgtagccttgagtgtagtgtactttctaacaagttgcccagggcctcacagcttctctgtttggcagagggggtctctgggctgcagctggccta

SEQ ID NO: 35000 - DNA, 1189 bp, Mus musculus
atatgtgaaggtcaggggccagactgggcagagcaggaaccacaagcggccaggacctgactctgcggatgctgccggctgagacagggtccagggaaaatggagcagtgaggagaggtcagagctgtaatgcatggaggccagaggaactcttttaactttgaggtgtcagagtaggggacaccagaaggtaaaagcaccgaagccgccctgggggcctgtctagagcaagaactaaccatccatctcccccgtagcctgagagactccaggggactcactactctgtgcagtcggacatctggagcatggggctctctctggtggagatggcagttgggagataccccattcctcctcctgatgccaaggagctggagctactgtttggatgccatgtggaaggagacgcagccgaaacaccacccaggccaaggacccctgggaggcctctcagctgtgagtgaggactgggaggcaggggtggtggtgggtgagtctaccctttgactcatagtgacaagtagcctcttatctgtatctataaagtattttctttttcttctttataaatctgcagcatatggaatggacagccgacctcccatggcaatttttgagttgttggattacattgtcaatgaggtaagtgctgccaggtttccttgaccttctgcataagacagtaagtagagggctggagagtttactgctgctagattgctcagcagttaagagcactgactgccctaccagaggtcttgtgttcaattcccagcaaccacatggtggctcataaccatatatgctgagatctgatacccttttctggtgtgtctaaagaaagctacagtgggctggtgagatggctcagcggttaagagcactgactgctcttccaaaggtcttgagttcaaatcccagcaaccacatggtggctcacaaccatccgtaatgagatctgactccctcttctggagtgtctgaagacagctacagtgtacttacatatgataaataaataaatcttttaaaaaaatttaaaaacagaaagctacagtattcatataaataatttttaaaacaagtaaaagaaagcaagaagaaggtggtggtggcatgcacttttaatcccagcacttgggaggcagaggcagatggatctctgagttcaaggccagcttgatct

SEQ ID NO: 35001 - DNA, 1134 bp, Mus musculus
ttgtttttctctgtccactgtgggttctgggcactggacttaggttgtcaggcttttttacctactgggccatggtgctggtccctcatagctaactaatgtatcaagtttttactgtgcttcatgtatattagtttgtttaatccatgtaacagcccatgattataatagtgaccttataattaattattcacagcattttgcaagttgcagaacctgtttagaagtacactagatagtaagggacagagttagtgtttaaacttttggcaggttgactatagagcctgcacagctgacgctatcttatgctgtcagtgtaaagcaagacttttttcatgaccactgtatataagtcatttgtttaaagaagctcacaggattttgtttgattgtttgaagcctgcctgagttctttgatagctggatgaaactgaaggataataattcgttaaacagatgtgttgcatgtgaaacttactttcttttggattttaatagttgaggtgatagaaatgttgttactaactggtatgatattcttgttcttaggatggtgggtccttggatcaagttctgaagaaagctggaagaattcctgagcaaattttaggaaaagttagcattgctgtgagtatgtagtagagtttttttccagagtaacaaattttagaaaaagttagcattgctctgagtatgtagtagagtttctcttctagagtgacgaattgagagaaaataggtgagagaggaaggtgagtcagtgaaggagttgatttcagaaataagcttgctagagcatttcccataggatgaccttaaacatctgtacttctgtccctgctgcttccctactgctgggatggcagatgtgcaccccacacccagttttattctgtgctggggatccatgtggctcttactcctgcaaggcaagcactttacccattgagctaaatcctcagcctcaactttaggttaaaacctgtgtctgaaaaacagggcaaggtatctttgttagagacaagaaaaggtctttaaagttgggggtttagaaaacaatctttcacagagtgttttgaaaacttacattggccacccttaccttaggctaacagtagtgctttatagaac

SEQ ID NO: 35002 - DNA, 1206 bp, Mus musculus
tctagtgagggtttaaaaagtgacatgtatttctgtgtgtctgagtttgagtgtgtgtacatgaggacggctccagaggcgttgggtcctttggagctggagtcacgggtggttgtaaactgcctgacatgggtgtggggagcacccatgttctctagaagagcagcagcaagtgcttttaatgtcagagccatctcttaggtgcttgttttcactcttactagattccttggttcctcttgtagacctttaatatgttgagagaaatccaggaccctcattgttcaatgctgcgttgtgagataaagcagggttgaaggtgaggccctagggatgactgaaatgagcagagccctggcgagttgaactctttctttcgggcgttaccttccttgagtcccctgtgggcttggcccaggagtgcacggctgcagggcaggcggggcagagcgagcgtctctgtgctgcgccagtgctgacctgggcctcctcggggcaggaccaacctggaggccttgcagaagaagctggaggagctggagcttgacgagcagcagcggaagcggctcgaggcctttctgacgcagaagcagaaggtgggggaactgaaggatgatgactttgagaagatcagcgaactgggagctggcaacggtggagtggtcttcaaggtctcccacaagccatctggcctggttatggctagaaaggtgagcttatctgggtaaacagctaattatcaattaggagcctgaatgggtaaaagaaagggtttgtttgtttgtttgtttgtttgttttcgagacagggtttctctgtatagccctggctgtcctggaactcactctgtagaccaggctggcctcgaactcagaaatccacctgcctctgcctcctgagtgctgggattaagggcgtgcgccacgaccgcctggcaaaaggaggtttttacttaggactttttttgtgcagttagattgaaaaccatacatttgtcaagtgcagaaaggagctgcttttttacacccagttctagtgactgatgctcaggccaaagctgagtttcatggcttcagtcttgacccaatccctttcctgttcaccacgtcataacacgtgccctgtatagagagactatgttctaccatgtttttcagctcacccggctctttcttctctccatgtttgtattgtgccgttccttct

SEQ ID NO: 35003 - DNA, 1188 bp, Mus musculus
tatattataaccccatgtatataaaatacactacagtcaggtatggtgcacatctctaattccaatacttggtaggtgaatgccagatgatcgaagagttcaagatcctttctgtgttgataggatcctgtaactttaattttttcaaacgcctatttttgattatggttcttaaatgctttaacctccttgtaacccaccagaagtagtggaaaagaagggatacggggaagtggacctgtttagaaaggttcttttggagcaactcttatctgtgttgtcctgaaatcagcagttcagttcacaggttagcaggcagtggcagctcaatccacttgcaaacacttcacatcagcagtccagctgggtagagtcaggatagcaaacacgaatcagcagcagtgccatgacctaacaaagacaaccaggcctcagcccacgctccagtcagcaggagggaccaacaggaacatcaggagatcagtgaagatcagcgaagacgaagatgggagacctacaagcactgaatggctagctttataagcaggccttagctcagcctccatcactgtcctttttatactctctccaaacatcatgtgtcctccacgggtcttgccttagcaagacaaaactctgccaatcagcccaagtcctcagaagctgcaaaaaagccatggcacagcaccagaagttttttggtgcatttctctctatagagtcccaactaatgcagttcaactatgcagtgtaaagcaggccagtacatggtgtcattagcagagactcttccgtcatgtgtcctttctcgtccttgctttatcagaacatcctctctcctgtgtttgcttcagagaaaccttccttctcgagtttattgtagtctttcacctgtgtccacttcagctaaatgttctttcacatgtttgccccagcaaagcaccatcgagctgactttccaaagaacctttaagttttctttcacctctgagctataccggagctcagctaaaatgaggcttgtttgtttttggttttctttgctagtttgatttctttttttttttttttttttttttttttttggtttttcaagacagggtttctctgtgtagctctggctgtcctggaactcactttgtagaccaggctggcctcgaactcagaaatccgcctgcctctgcctcc

SEQ ID NO: 35004 - DNA, 1218 bp, Mus musculus
tatgtaagtacattgtagctgtcttcagacactccagaagagggagccagatcttgttagggatggttgtgagccaccatgtggttgctgggagttgaactctggaccttcggaagagcagtcgggtgctcttacccactgagccatctcaccagccccctaagtttgttcttaatctgtctggttgggctcatatgccctttaacatcctccttcacttttctgcaaggttttctgcaaggtagtcttttcttagtttgtggtgctgaggttcaaacctagggtcttactcagttccacttctaagctgtaccccccagctcaatgacacacaaatgcacacttatttttttttccccagttctagagatcaagtccagagccttacacatgctacatatttgctgtaccatcaacctatatctctgtctacctgcatgatttgattttgttttaaaattgctatcatatttacctgctgtaagggccaggtcagactcttgtattgatgtttccctagcatcttgttcaggacctgtgctaaataaatgaatgctacccatttttaaggttcatctgtggctgtagtctctctctctctctctctctctctctctctctctctctctctctctaccaagttttgctgtcctctaactttggtgctcacttgccttaacctcccaagggatgcaagggacgcatccaagttcacagttgtgctctgtaatgtccgcctcgattcctctcccactttgtcttgtttgcaaaaattcccaataagattacgatacccagagaacaaaatttattctgagccatccattgggtctggggtccataactgcattttgattggttctgggtttctgtaatgttctttgttagaaagagaggcttccttgatgaggatggagtgctacacttttctgtggttataaagacaagtgtttagattgtggttagggattatgctaatttagtaaagagattgtgggttctttaagattcataacttcactaggtagtttgctagatttttaataccaggttaagctgtatgtatgtgtgtgtatgtatatattttgatcttttgttctatcccctggttttgttgtcccagatctcaggagagctgtgtgctgagttcattcatgcctggatgaatggagttctgttttaaaagagcaggtgttctgagatctggtaaagggccaa

SEQ ID NO: 35005 - DNA, 1383 bp, Mus musculus
tcccagcaaccacatggtggctcacaaccatctgtaatgggatctgatgccctcttctggtgtgtctgaagacagcggcagtgtattcatatacattaaataaataaatcaaaaacaaacaaacaaaaaatcccagcactcaagaagcagagactggcagagagttctgaatttgaggccaacttggtctgtataaggagctccaaggacagccagggctatatactgagactctatctcatgcatacaatttaaaaaaaaccatgattgcagtatcattagacaagttatagaaagtatctataaaaaaagggaaagtggtggcacacacctttaatcccagcacttgggaggcaggcagatttctgagtttgaggccagcctggtctacaaagtgagttctaggacagccagggctatacagagaaactctgtcttgaaaaaccaaaaagaaaaagaaaaaaaatcctaaaaccagatccatggctagactttagtgagaccttcgtgactgtacttggtattgattgcattgttagttgtacagtgcaaccgtagacagtcacatacatcaaaacagatggttcctgccgacagagtctgtatagttgtcagattttctgtgcgatggctccatacataagattttaaaaactttttaaacatgtatgtttatttatgtgtgcatctgtatgttgatatgtgcatgtgtgagtgcagttacccaaacacgagctgggtttataagaaattgtgagctgcctaacatggattctgggaaacaaactgtggtcctctgcaagagcagcaagtgctcttaaccactgagctgtctttccagtcccttagtctttcttttttttttttttttttttttggtttttcgagacagggtttctctgtgtagccctggctgtcctggaactcactctgtagaccaggctggcctccaactcagaaattcgcctgcctctgcctcccaggttttgggattaaaggcatgcgccactactgcctggccagtcccttattcttatttttatctagtaatgtatatggtgagtcataataataattgccgaatcttatataataatagcacagaatcttcttattgtttaaatcagtgattctcaaccttgccagtgttgcaatcctttgacacagctcatcgtgatgttgtagtgggccccaaccatacagttatttttgttactagttcataactgtatctttgctactgttgtgaatcataatgtaaatatctgtattttcttatgaatttaggcaacctctgtgaaagaattgttggacactcccctttgatccatcggttgagaatcactggtttaaatagtctgggattttgaattcttttaaaag

SEQ ID NO: 35006 - DNA, 1149 bp, Mus musculus
ctagatttatttatttattatacacaaatgttttgcctggataaaagcacttgctgatcctacagaggacctgagttttgttctttgcacctacattgtgtggttcacaatagcttataattgtggttttaggagatcctgtgccttttctggcctccttgggcacctgcacatgtgtgcatatagataaataaaaacctaaaaaaagaactatagtaagtaaatactatgttgtaaaatgtctcatccagctgggcagtggtgtgggaagcctttaatcccagcactcgggaggcaggggcaggtgaagcttttgtgaatttgaggccaacttggtctacaaagtgagttccaggacagacagggctgttacatggagaaaccttgtcttgaaaaacaacagaacaacaacaacaacaacaaaaaatacctaaaaaaaagaactatagtaagtaaataccatgttatgtctcatccaaccggacagtggtggtgcatgcctttattaatcccaatacttgggagttagaggtaggtagaactctgtttgaggccagactggtctacagagcgttctgacctcaaggagctcatgtgcatatacctacacaggagctgaaggggtttgcatggctctaactgcatatgtagcagaggatggctttatctggcatcagtgggagaagaggcccttccttagtcctgtgaaggctctgtcccactgtaggggaatgccagaatggtgaggtgggagtgggtgggtgggtaagcactctcatagaagcagggggaggggaataagagagggggtttgtggaagggacacccactgggaaagggataacatttgaaatgtaaataagatgggcgtggtggtgcacacctttaatcccagcacttgggaggcagaggcaggcggatttctgagttcgaggccagcctggtctacagagtgagttccaggacagccagggctatacagagaaaccctgtctcgaaccccccccccccaaaaaaaaaaagaaatgtaaataaataaaatatccaataaaaaaaaatcatatgactatgtaatgatggatggatgacagtggcttcttgccatctcaaagtttcttaacaatagggatttaaggctcattttctgtt

SEQ ID NO: 35007 - DNA, 1126 bp, Mus musculus
cacctcccggacccttggcattttaagtgtgcttttatgcatgtgtgaaaaagtggtttatatttagacttacttatcataattaggtgattatcgatttgatagctttgggagagatctgtttatcaagattggatcagttgcttgtaatgagtaataatgatttgatttttctctcagatgtgacagttgaagagaacagtactggtgaggatcaagaagagtcaaatggattaaacatagacactgctgatggtccacatgatgttcctttcgccagtacacatgaagaggaacagtgcaaagcagaggagacacaactggaccatactaacttagactaatctagaaatgctataagtagccaactctacaacagaatcctgcaagcttggggttacttgtagtgttttctaccttgtataaatccttaagtcttaagacttatgtggattcctgcttaaaatacagtgactatttaaattgtttcctacttattttagtaagtctgtttattatttttggtgtcctgtataagtctgcctttataagctattttgtagtttgcattgaattgtttctcgctaaattgggtaatgatttaaaatgtaaatatgcactcactattaggtcagtttttataaagaaataaattattttgtaagcaactctcaggatttgagtttctcaccatgatttagttatacaatttaaactttttgctgaagcagttaagaattttgactttttaaaatctcactcattacagcatcctggctggtctgaaattagaggtcaatgtcctgctttttctgccttcaaatgctctgtgtgacagctgtgtacatcatctggtcttttctttcatatcattattggaacagtctgtctcactgcaatctcagctggtttgaaggctgctttgtgttggggttaaaggtctgtgccacaacactcatcttgctacagagtcactttaatgtttaaaagatcacataaaaggttgatactgggactggcaagatggctcagtggataagagcactgatggctcttccaaaggtcctgagttccacagggtggctcacaaccacccgtaatgagatctgacgctttttctggtgcg

SEQ ID NO: 35008 - DNA, 1150 bp, Mus musculus
ctcccctttggaggctcctccttttccttgtccgtgaatattaaataagcagtcttacttcttatggctcctttatgggttcaagttcctatgccatattggtcaagcaggtattttagtcacttggatctttctttccagacagacctgctgtctgccctgtgtctgtgtatgtgggtctttgtgggtgttgatgcctcttggtgtgttgtgtgttctacgaatatgtacctcttatctgtttccgagcagtgtcataaaaaggggtgtgtcttcgtggtgtgacttttggtctgttttttgtctgcgcctctgagtgtcagcaccctcgtgtctgcatacatttctgcacacactgaaggcccagtatggacagatcttgccagggctgggtagcctagtgcacagagcaccctggggcctacaacttctctaaggtcttcaggatgtcccctgctcttcctcccatctctagacaagcctcagagtccccaggacacttgttaattgccctctgtctcttctctctgcctccctctagaggcgtcctgggcttgggagagctgctactgtggcagctaggatagccctaagtcatttgcatttgtgtttgcatctcatttgcatggtccatacagactcactttcagctctgcagttctcaaggtaaaaatgtagtgcttttcctgaaggtcattataataagcctttttagcctttttttcctttttttttttttttttttttttctggttcagactttcttcacggaattcagggaaagaaggcagcagaaaacacccagaaaccattgctttactctcagctcttccagctgtcaggtaaaatccctgggtctgtaggtggaggtcctgggctttgggagaacagatagtctctgaaggcaggtctgggcaggggccccctgctcctctagttcctgggcttagatctgcagaagggaacagcaggggatctttcccgctgccataggcctgagctagcctggaacacagagaggatgaagtgtgtcttttcctttcctttaaaatccctaacacataattggccatcttaggtcacaagcggcatcccaaaggcttcctcaggaaggcaacacctgaccagcatattctccacagcccagcgc

SEQ ID NO: 35009 - DNA, 1195 bp, Mus musculus
cagcctggtttacagaatgagttccaggacagccagggctacagagagaaaccatgtcttaactgcttccccttcaaccaaacaaaataaaaaccctaaaaacccaaacacaaaaccaaccaaccaaccaaccaaccaaccaaccaaccaaccaaccaaaacagtataggaatataacccactataacccacagtggcagaataacttgactaaaataatttgccacagataggtccagaagctcatttccaggtaatagattctgtccagttgatgacagtaacctacacatttttgaatattcacaatatttatgaatatttaggcctccacttgtagaagatgggctgaggcctggggtgtataacatttgtaaccaagccctgctgcttgctaatggagataatacagaaagtctaagaacagcctgcctattctcaaaggaacaaggcaatgtctgtcgggaaccttctcacctggagaggccatgggctctcttcttagccacctttcctgagcacttttctgaagatggtcctgctgtgtttggattcttgaagtttcctcaccccaggttaccttcccatttggctgctctggatatcagcattcctttttcttccaccacagagaatgtccctgctctaaggtccttacaaaccttcctcttgccagagagtgcattgagacccagagataggaagttaggtccaagcccaaggtcatatggtgacctggtatagcttctgggccctaccccaattagacaagaatgctgggatttcagcagtgggtggttgggcctgaggtataataaaagacatgattagaaatgtaaagggattgggttcctatatagagtagggttggcccattcctagggtccttacacaggaagtgggttgcagggtaagcactttacagatggggccatttccccagatcattgctctctctctctctctctctctctctctctctctctctctctctctctctctctctctgtgtgtgtgtagtgtgtgtgtgtgtgtctatgtgtgagtatgtgtggagtgtgaatgtacgtgtatggtgtgtgtgtggtgtatgtgtagggtacatgtgaatatgagtatgtatgtgtggttgtgtatgtatgtgtgttatatgtgtggggattgtgtgagtatatgtatgagtgtgtgtggtgta

SEQ ID NO: 35010 - DNA, 1154 bp, Mus musculus
tcgatagcatagcttctctttctatgtgtccttagatttctctcttcttctttatccataaattgaaggattggcctcctctctgggatacctttcagctttaatgagccacaatcttaagtatctagctggctgcttccatgtatttaattttaaaattacattaaatctatgtgtatgtgtgtgcacatgcacgtgccatggtgtggaggtcagaggaaccatggaagttggttctctccttccaccacgtgggcctagggattgagttcaggtcgtcaggcttggaggcaggtgcctttacctcaagagccatctcactggcctggggttttagagagctttattttatttagtccacatggaggaatcagaagagcagggtaaggtggagttttaattttgcatctgatctggtagcagctcataaggctgtccacatgggtttgcaggcttgcctgacacaacccttcttcattttcacaatttctccatggtaccaagcttctctagcaggtctgcaagaacaggagagtgggccacagccagaggctcactgccggagcaagtgcgtccctccacagctgcccggagcctatagctcctcttctctttgggtccctctgtgttctcagacctgactctgctgtgactggagggaagtccctggcagtgaggactctgctggctactcccttggtacatctagggacagagcctgcctcttaggatctcaagcttgcagcaaatgccaggcaggagctggtggtggtggggggggggggatgggagtaagtaagtttgttcctgtctggctgggggatggactagccttctagtgcagggttcctggcagaaggaagggctcccagcctggcccagggttctgcaggctgaaggcttggcagtgcgtgaaggggggcacttcttcatctccctgctttttcaactgacttccctttggcagtgggtcttttggcgggggacataccacacctgtgttggtaggctagtaccatgcagtgcatagtggtgaactgtatgcagataccgcatcttgctttgggtggtgggtccatggtggctgtgtgattaggtgtccttggtcctttgagtacctcttgctgccctccacccatcctttctttaccctt

SEQ ID NO: 35011 - DNA, 1158 bp, Mus musculus
attatgtcccttccttttctctttctttctttctttctttctttctttctttctttctttctttctttctttctttctttctttctttctttcttccttccttccttccttccttccttccttccttcctccctccctccctccctccctcccccctctctctctttctctttctttctttctttctttctctctctctctctctctctctctctctttctttctttctttctttcttttaatagggtctcactatgtagctctggctatcccggaactctatgtagaccaggctagcctcaaactcacagagatgtaccttcctctgtctcttgagtgctgggattaaaggcatggactaccactcctggctctgtttcttaaaacaaacaaacaaacaaacaaacaaacaaacaggagttgattctcagtaataaagtacttgtctagtgggcacaggtacttggctttagtccttagttctgaaaggcgaaataaaataagagccaaccaatctaccaaccaaccaactcaactaactaaccaaccaaccaaaccaccaccaccgccaaaacctcacaacaaaagccaacaacactagactggcaagttggttccgtgggtaaaggcactcaccactgctgagcctgacaacccaaatttgatcctggtacccacatgatagaaagatagaactggctcctgcaggtcgtcctccgacttttatgcgcatgagcacatacatatgtacacaaatgactacatgcaactaaaacatctttggaaattcactgtcctagagaggtgtgttatgaattgcttcttgagacgactgtctctgatcctggttcagccatgcctgtttcttactttatttagcacttgccacaacttcaagttcttcacattataaatgtcctacgtgcatcagggtatccattcattgggtttcaacctattttagaatagctaaaggcaggaggagaaggcctgggggataaatgagcggatgagagagcttgctgcacaaccattaggatgtgagttcaaatccccagctcccacatgaacactggagtatgcctgccacctcagaactgcaggaggggcagaaataggaagatcactggagcttgctgccttcccacctagctccag

SEQ ID NO: 35012 - DNA, 1154 bp, Mus musculus
gcactggcttggtaatcagacggggcgagatagcaggtacagtgtcaggtcgatggatggaccgaccctctttcctcctgtctgttcccactgctgccgtgcaccaagaattttggagagctggaagggccatcagacagcttctttaaaaacattttaagatgtttatttattgggcgagggcttatgggatgagatgtgtaccacacagaagtcaacttgtaggagtggattctcttctttgactccgtgagtcctggggattgaactcaggtcatcaggcttggaggcaagcacctttacctgctgagccagctcgccagcccacaattaatttccttttataaatggggaaactgaggcccagaggagcattagaagtcttctggtggccctgtggctggtggaaatcttctatgcaggctttacgcctatgtgtccttttggattgaccaggcacttgtgaagggattataccttctgctgtttaagaagcagcccagaggggtgcagttactcacacagctgactggacttggagggggagattggattctggctgctctgcctctggcctgattcttctgatccctggctgggtgctcagctctggtcctccttggaggccatgaaacaaccttgtcagcagattctgtccccgtacagttcctcccccagcagctgcaccaaggttggcagtcacacgagctaactcctcttctcgcattgacacgccacaacacataagcacacaactctaccatttggctttagcgattgctccacagtgggtgaaattggcttgaaataaatgtctcctctgccttcccctggggcgattttatcctcatctccactttgtggaatgatccggaggctgccaggagcctgtgctgtctagatacgtcctttctgatgtagagatgttactacagccacgtctgagtgagatgtttctggagagccactggaagacacctgcggcatcccacaccccagcatcttgggggcaccatatagaagagctgaaagtaaagaagggggctaaggagatggttcagattggtaaagtgcagccactaagcaaatgtgcagacctgaattccattcccaggacctatggtaaaatgtgctggtatatgcttgtgtttcta

SEQ ID NO: 35013 - DNA, 1224 bp, Mus musculus
ggagatactgggttacaaggtgaggcaaaggcccctgcttgatttcctaaaggaactgttggggaaggactacaaagaaacatcaccaggctcgatgtctcaggaatgtggctggcagcccatgctgtgaccagtgaagactggttccagctgccgggccttggcaaggtcttggggttcagccccacaggtgtcttggaaagaaaagatgatcctgattccagagtgtggaatgggggagcctagctatgtggggaagttctgctgactccctgaggaggagtctgtgagtcttgggcgcagctggtcttgtctacaacctttaatcaattaatcagttaatcaactcaaaggatgtaaaggtgggtgtaaggtttccttgtctccatgtgggaagaaagacgcctgccatagatggcaagtgaccctaaaggaattctggggtgtgtctgggggttctgagtgactctgtcttggctccccgtgacagtggaagaaaagctgagcagacactgtgcagacatcgatagagctctaaaaagtggcccctggtgtgcggacagccactcggggtgcagcgactcagccggaggtcttaattacctgctcagaacaagagacagatctgagatgtgcagagtttcgtgtacaaagtgttttatttcccggggcgggtgcagagcaaggagagccatatggcccagtggttgaacagctgtctctggagaaggagcaatcgggagctcccaccatctgggcaaattacaagactctcgactcttccctgtgtgttgcagcagtcaagtgggtctgtgatggagagagaaggaagtaccctgtgtgcactcacctgggcagctccgccaccgtccttccctggatgccctgggctgccctcctgagcccctcagagcttctcaccgaggtcacctgcagcaaatgccctcccagcttcaccccacagcctctgcccagcggggaagccttctgctttctctagaaaacataaatgtcattcctttaacccagccccctcttgcctctttggcaggctgcagagtctacttgaagagtgcttagtggtttgaggctgttatattttctctgctctatgatccgtgttaggttaaaagggccagggcggcttttccttcccatggaagataactcaacccggacaggctccctgtgggagaattaaaggtgacgagggacttctgcttg

SEQ ID NO: 35014 - DNA, 1502 bp, Mus musculus
tttctgttctgtgtgtcttctgtctcttttacacaaagtcttcatggtttatacacactgagtgtttctgtttcttctgtcattcagagatataccgcattgtttctcagaagcaaatgtcagacagacgtgaaaatgacatgtctccaagcaacaatgtggttcctattcatgttccgcccaccactgagaacaagccaaaggtgcagtgctgtcagaacatctaaggcgtctcttcccctagaaggctgtgtatagtccatttcccaggtctgagatttaaatatatttgtaattcttgtggtcactttctgtgttttattacttccttacacttaagaatcttcccatgtcttaagtcttttgatttggctttataaaatcctcaactttgtcctgaatgactgcagttctttttcatgctatggcttctctagccttagtttaataaactgaatgtttgaagttctcagttattgtttactcttcatcatggaagcctgtcactgtaggacagaatagaactctatcacttgaagtttagacctattggtcctgatcagatctaagacaaccttagaaataagctattgttttgccacagagcagcttgtaagacactcttctcaatacagtacatattttgacagatctaaggattgccctgtaaacataacagcattttgagagcttgaagattttccattgtggaagtcagtttctaaaatgccttaataggtctatgttgtaaattttttctttaatttttgtaagcatcaaacatgatggggattcttttttgttgtttttctggaaaagaattaataaacacaaaggactgttatggtttgcatagggtgtggttatgtggtcaaagttaccctgctgtctggtaggctagtggacttctgtctgaggtgtctctgttgcagtgatcggcagccagagtagcttaaccaatctcatttcctagattgtgatatttttattgctcatgtaataactagcttaatgctggtaatatcacattttgaagtgttaattttgcttttaaacctgtctagtaagtgaaatgcagcctaattttatcaccatattcagcaaccagcatgggtaattattttaacaatgcttatatttgagttctgcagtgtataatggaatatagctcaattaatcctttggttttagtatgtctaaagaatacagtgagaagttaatttatactcaagtggtaccacttaaaggcatgtgttcttttagtatgtaaagtgaaatagtaccttgaatttaagtagaatgtacttagccattgtagggccctgaaatagatttttccactacataattgaaatcaatggaacaactagtttctcattcagaaatgtacacactaatacttagttttacttccttgtggataatattaagcacttaccctgacgttttctgaaagttaactgcaaagacgttattaaggatggtgggatacctgcaaaaac

SEQ ID NO: 35015 - DNA, 1166 bp, Mus musculus
aaatagtgggacgtttgataagttaactaaattctgaatagtctcactcattgttattggtggtatttatatgcagaagtaattacaagggagcgaaaatttcttactgttacttttaacttactgaagtaaaagtaaaatattgtctatatattacgccagaagttggtaccatttagaggtttttgtttggtagtttgaaatactttctcatgtatctttcagatagtctcatgactatctgaagaatagtctcaggctggtcttgaattcttggccatgctgaactaagtcttagtcttttatcttcccttttgtgattgtaagcttatcacatcttctgttttaaaacttggagaaagccgggcagtggtggtgcatgcctttaataccagccctctggaggcagaggcaggcagatttctgtaaattccaggccagtctaatatacaaaggagttttaggacagccaaggctacacaaagaaatcctgtcttgaaaagccaaaaaaccaacaactaccaccaaaaaacaccttatggaaagttggggaggtaggtctgtggtagagggcttggctggcattggggaggccctggattagatcaccaatcaccaacactattaaacagcaatcaaaatttaccagactgaaaattttgtttctttttacagagaagaatggtttgtcattcattgagacatctgctctagattctacaaatgttgaagctgcttttcagacaattctaacaggtgagacctgtgttttcggttacaccaatgggaactggagttttaggaagtgagttaaactaattaggaaattgttatgccacctgaaaatgactatcattagagagcaactgtagtataaattccttgatgtgtagagttacagtttttgcaggttgcacttcagtcatgtgaattcatctggggaaaaattctttgaaagtaatttgttcatttccttgtgttcaggcaatgtagtctatacctcatagtcaaagggacagttacatgttcttatgtatgttcttctctttttaaaatgcactttcattacgtaaatactgagatcctgactatagaaagatataaatgccttttgaagttagaaattggctggagaggtggcttggcatttaagggtaccttccgtt

SEQ ID NO: 35016 - DNA, 1199 bp, Mus musculus
ttctctctcttaaaattcatcttatttttattcatgttttgcctgtatatgtgtatgtgtaccatgttcatgcttagtacacatggaggtaagaagatggtatccgatccattgaaagtatagttacaaatggttgtgaaccactgtgtagatgctagaaaacaaacctgggtcctctacagcagcagcaagtactctcaactgctgagccatctttccagcatcttgtatcttttctcttaatagacccttttttctttgtcatgtcataattgctttggggggctattattaaataaactaagggttacttgaacacagaaaagaccataaataatggcagagctacaaagtgactttaacaggcaggtagtttatatagtgtgtgggtacattggacaaaagaatgaatcatgtgctggcctggatgaaggggaaaactgaggagtttgtcatgatacttaaaatggtggcaatttaaagcttatgaattatttattattatttcccatttaatatttttggcctgtggatgactaggtataaaacctcatataagggatgactactatctgccatatctggtgtgtgtgtgtgtgtgtgtgtgtgtgtgtgtgtgtgtgtacgtacctggtctcactttgtagcatggtactcattatgtagcccaggcaggcctcagacctccagcacccaggacagttatgtggcaccacccctcatgtgataactaggaattttcagaaatttatttacaagtttgtattattgtttttaaaaatctctttgtgtgtgtgtttgtgtgtgtccctgaggatgagcatatgagagaatgtagagggtgtttgtgttagtgtgtatgtctgtgtattcttgctgtgtagatagaggtcagaggacagacaaccttggatgttggtcctcacacttgtgaggtcctaccttgtttgagataggcagtatttgttgttcagtgctgtttatgccaggatacctggcctgagaacgtctgggattctcctgtttcagcccccaactcccttatatcacagtaggaggaccaggattgctgagtgctaccatgtcagctttttcatggattctggggatttttaacacccaagcagatcttcatgctggatggcaagtgtttccgccacagagccatctctctagccctataccatcaccttttgtgt

SEQ ID NO: 35017 - DNA, 1203 bp, Mus musculus
aatgttggaatgtttatagcaacaatagcagtaaactgcctaaaacgggccctgccgagttccaggcagccagtgagcacctgctgttttcattcctgttactagtatttaaaatatttaaggtaacatatttgcagagtacattttcatagctgaaagcacatttcttgttttccagaaagcacacctgagctgctcttaatgccatctcttgaggacacaaatgaagcacaaaccacgccaagcaggtgctttaggaaaaggcataaaagtgatgatggatctcacttgcagcagcaaatgccttggggaagcaggaaccgtaatctcagtggtggggtactgatgggattcatgctgaacagaactaaccaggaaacaagccctggagagatggttgaaaaattaggagctgatgcaaaaattctttcaaatgttatctcaaaaagcacaaggccaaatagtcttgatattggaaaaccacccgcaagatcaaagagagacagcctagagaaggagtctagcgacgatgacacacctttccatggttctaactgcctggataaagtcgagtctcctgttatctttgacttagaagatttagacactgaaacagatggatcaaaagtgggcggtgtcgctgcacaaaatcccaagaggcttcaacgtaggaacagcagcttttcagtaaaaccctctgaaaaaacagatgttgtaacaggctttgatcctctctcgcttttggttgctgagactgagcagcagcagaaagtggaagaggaagaggatgaagatgataacaagagcgtctcaacaccatctgccaggcgcaatttagctgaagaaatcgagatgtacatgaataacatgagcagtcctttgacaagccgcacacccagcattgatttacaacgagcatgtgatgacaagttaaccaataagaaaagcccaacattggtcaaggcctgcagaagatcaagcctgcctcctaattctcctaggccagtgagacttacgaaatccaaaagttacaccaaaagtgaggagagacccagggacagactgtggtcctccccagccttctcgcccacgtgtccatttcgggaaggatctcaagaaacactagcccattcatcaccttcatttaacttagacacactgctggtgcctaaacttgatgtcttaaggcacagtgtgttcact

SEQ ID NO: 35018 - DNA, 1199 bp, Mus musculus
atccatgtgcccgaagtattcagatccctgctcacagatcaaaaactgttgtgtcaaaatgcccgctattcccaatggccagaagcatcagcacatgtggccccttggataaggacgatcccggaggacagaagctcattcctacaggcagcctgccagcgactttacaaggacatacagtatgtatttcagtgtttctcttgtttgtaaagtgattgtttacacaatcctgttgccttggtcctgaataacattattagctttatatagaacaatcagtattatggttttatataatatagaacaattatatcattgtcacagagtcctgctccatgatacagtcatggaaatcacagacattttcacatcctcattcttacatgtgtcgtgtatgttttcttcaacaggattctttagggttagaatggcacctgccgagtccagaccctgtcactgtcccataccttagtcccttagtggtgtggaaggaacttgagagcttattggagaatgaaggtgaccatgcaataacagtggcagactttgtggaccatcacccaattgtcttttggaacctggtgtggtattttagacgcctcgacttgcccagtaacctgcctggactgattctttcttctgagcattgtaacaagtattcaaaggtaggagggtaaagtcagaaggggaagtaatctggctattatcattgtattctttgcatatgcctcatgacacaaagtgaggtttgtttttatgtttgacattttcactaccctcggaatcggcatctaaacagaagtgccctcagttgaatttgcagactagcagtaagacagtcatggtttcagacttctcaaaataacacaaaacatggttgaatattttgttatcacttgaggaataatgtggaagttactcttatgtaaaggtttataagttagttccccccacacacatacttctttcagaaataagaaacatcagtctattttagtggtgtctaattcattttgtaagtgtagactccccttttcttccttcccttactctgagtttattatgttcatttatttatttaattcagttttaaaaactggtgctgaggatcaaagccaggacttcatatgtgctaggcaaggactgtaactgagatccatcctcagccgttttatatttccatttctgtatgtgtgcac

SEQ ID NO: 35019 - DNA, 2190 bp, Mus musculus
tgctctttgaagtaattagcacagctgcagatctctatgtatatctacctatattttttttattacttgagaggaagaactttaactcgtcagtgctagtgtctgtgcccttggattgcacgctagctcccctgaatctgactggtgagagggactgagggaggcatggtgtgagccctgtgcagggagtgccaggcagggcacctgcgccatgctcaccagtctcttctactacgaagatgcgaaagtacccaggggaaatatctcacaacccaaatatcagcgtgagtctcattgtgctatatgaacacttacagagggggtatgactgacaacggactctctaaatcttacccaaaatactgggtatgaaacaaattgcactataaaatatgtatctgaaatatggtttaatggggtagtctgttaataatatatatagagagaatcaaagtatttttgaaagaagaataaatagtaacggtctaaaagtgcatccagagagaatttcccatattgaggaacttagttttttcactaagcttcaggctctgaagttcaggaatcgaaaatgtaaactctacttaatcagacaagaaactcaatgtttaagaaccagtagtagtaaattgacttcaaatccatttttagttatattatttctaaaatcactttctttgaataatttctcataaggaaaaagcatcctttggcctctagaattaattattcatgtattttcagtgtatgtatatacatttgcaaaggttgtcatttgtaaaggaaggctagccattttaacaagaagaggaaaggggaggcggtcccaaatttgatgtttaaagcaagtggagtccatgacgcttgacctgggatatcttaagagcccggagactcacccgttcagccgcaggagagctgcctttcggtccctgcccccattgagtagccaggctgcagagcttttgcctctggcaagttgtggagagcataaaatgtgaatcttgagttcagttggctgaggctgaactaacttacttgaaaacactggtgctgtgcgcgcgcatacctaccctatgcgcgcgcatacctaccctttgcgcgcgcatacctaccgctcctgtcgatccacatggcctccccggcctcactgcttcacgttcctcaagtcactgagaagtgtattcagtctcccgagactggggatgttcaagcggaggtccttggcactggtagtaaacatgccctctaacaggatttggggtctcatctgtgctttcttcttccttcccttatgagagcagtttgcactgctgcctccagtttccgtgatgcacactgtgtggtttgttggtttctactgtctgacaagcgcagagaggcagagctagttcttcgtactcactcggaaacagcatgacttctgtctcccaccctgccctcagttttgttctctgtctctaaataaagttgtatttttcctgcttttaatccccaggaaatatcattgtatgaagataatttttaaaaataatacctgaacatgggctagaactcagtaagtcctgctccaaagaaaactaaaataaggttcgtctttttgaaacaacttaatacaagctggttttcagttttttttttatttaccgtacattttgaaaaattatgaccaacagtgttggatgtccttgccctctactcttaggtcttttccattcttagttttgcttatgtctaaattgttggaaataaaccatgctcttgctaatatagtttaagactcttactaggtttgaatgttactctgtgtatgtacatactactttaaataatcaacatttccctcctgttgccagatgtcacagtatgtagctattcatcttctgattttgttttcctttctattttttctaacctttaaacccctgaaactatcagttattttactataaggttgtctagtatgtcttcccatttttgtacatagagaaatgaccctgaaaatgttggttcagcattttaggcaataaatacttatttttacttcatgctgataattattatttattggtgcaactaacaagcactatctattcctatatataacttgcattgtattttaattaacttacaaaaggaaaataattcttttaaagtgggtattagttcaaccttattttttctcttcca

SEQ ID NO: 35020 - DNA, 1378 bp, Mus musculus
ctgcgcaacagagattagaagtccaaatgtgaatggctgcaggggtcagaagggaacagagatgcaggagacaggcaggatcagttgtggtaatgatgcctgtggcaaacacaaacacctacttgggctgcacacagtcacacaatcaatctataattcttggggttagctcagtccatttacttgtgtatttctgagtggttggtgagattactttattgaactgtttttttccttgttagatttttttttctctttttttgttttttaagatagggttgttctgtgtagctttggctctcctagaacttgctctgtagaccaggctggccttgaacacagaaagagattcatctgcctctgcctcctgagtgctgggattaaaggcaaaagccaccacagcctgttttgttttgttttcggtttaaaaacaacaacaaactgtgtgcatgcagaatacagaccttgaggttggctactgttcaagacagcttcagtctctctaccacattccatgtaaacctatggtgaagtaacaccagaaaaaagagcctgagagtggtcgcttccatcttccactccccttgttcttggggggaaaggaaggagacttctgctgttgcagtgagcccagagtggattggcattaaactggctgctttgacacacctcatctcacccaagagtatttcccaagtctgcagcttccgtcagcgattgttgtgttaccttctggtgttccctcactgattgtggacaaacctggcagttgagctttgcagtcaattatgccgtatccctgtgcaaactcccatgttctagttgctgttagcatcccctttgttgctgtctgagaaagtgaaagattgtgtatttctattaaaacatttacagtcaaaatcctaataacttgtgcttaaacatcatttaatctcatgagttttaaatgggtaaagtgctttgttcaggcacagtgactctggcaggagcctaagggagtactgaaggcagtcacgaagcactgggtgagcactgtgcaggcacagcctgggaggcctgactctcccatcagtgctctcagaaccactggccagaaccttgctgaggtacaaagcttgatcactgtcagaaactaggaagttacacaggacccgagagacattgcttcttaggagtctgacattttggaagctgtattatattcaagggataagatagatcaaaacaccatttgtttctaagtgcaatcactatagaaaatcaaatatttaattttcatttaaaaacatgaacaggagtgattttacacatattgtggttacagtctaaaaatgtgtaccttgggatacaccagaagcacctgagcattgccacttgt

SEQ ID NO: 35021 - DNA, 1153 bp, Mus musculus
ttggggaggtgtcttgactcttagcctattgctgctaacatttttaccctcctcttgccacatagcttcttcatctctatgtggcatacagagcttggagtctaaactgataacatattatttactgttgcaaaaataacacacatttttccccctaagctagactatcaactggcttcgtgattattttttagaaaagctacctatctcacttattctcaatattatggcaagaaaaagaaggcaaaatggagtactcttaaagaataggacagctttgtcagaaattgtagctgggtatagtgctgcatacctgtaaccccagcatttgcgaggccgaggcaagaggatcttgagttcaagattaaccttggctacaaacagagaagtgaacaaaatttagttgttaaattcaagttccctttctgcaaacaatgacctataatacacattttttattgtactgaatttattctttcatcagctcgttatgacatcatgtaaaaggaacataggcacatagaaataaattctgtctttgtgtgtgtgtgtgcttgtgtgtgctcgcggctctacacgcacatgtcttcgggatcgtgtggaagtcggaggataacttttgggagtcctccctttacacttcgttgaggcagagtcgcaattgctgtgtatcccaggctagctgatcaacttcagcggttctcctatgtatgcctcccttgctgcattcgggctgctggattgacagccgctccaatgctcccctggcttccctgggatctttgggtttctgccacagtgcttttgccttttgaactaattccctgaccctagaaatacattacatccgccaaagtcaaggctttacagttgacacctcacatctatatgcctttttaaaaaggtttgtgtgtatgcgtgagggtatgtgcatgtgagtgcagttcccatagaaaccagaggtattggatccccctgagaactggtcttatgggtggttgtgagcagccagaaatggctactgagaaccaaacttggggcctctgcaatatcattattaactcttaactgctgagccatctctggtccgcttttgcagtttttaaaacctatcattttcccttgaatgtgtctggacatcaagatttacacc

SEQ ID NO: 35022 - DNA, 1164 bp, Mus musculus
cgtttagcagtaatccctgacttggactgacttgagagtatttataaagtttgctagctgtgcctttcctccagctgctgctggatattagattacagtttatccggttgtgctgctggttatgttacgtacgacatcatagatgtgaactgtatgaagagactctgaattccaaatacatgactcaatttttggataagggagtattagttcttattttacattaatttcatacaatatagaatacagatgatcaaaagtgataaattaaagctgggtgtactggcacatgactttaatcccagcatttgggaggcagaggcaggcagatctttgagttcaaggccagtctggtctaaaaagtgggttctaggacaaccaggactacccagagggggaaaaatataacaacaaaccctaaacaaactcagatcttacctgtttgctgggcatagtagtatgtgcctatagtccagccactcaggaggctgaagcaggaggattacttggaatttaagactagcctgggcagcatagtaagaccctgtttttaaaaaagaaaagaaaatcatgacatatcactgcacaccaaagcaaaagtgagaggactgagtacaccagatgctgaaactgtcagacacggttagtgaacatgtaaaataataaagatgtgtcgggggggggggtatgggggacttttgggatagcattggaaatgtaaatgaagaaaatacctaattaaaaaaaaaaaaaaaagatgcgtcctcacagagttgaacactcactgagcagccactctgcttctggatatttgctcaaaagaaatgaaaacacatgtccatggaagttactgtacaagaactttattcacagtaaccaatagcagcccaccacatgtctgcagaagaatggatgaaaaagatccacagcatcacccaacatggtggtctccactgttaatcccagtattcaggaggcgaggcaggccagtctctgagatgagcctatcacatacaagaccccatctgttaattactgttatatagatgtgatgaagtaccatgaccaagtcaagtcaacttaggaagcatttaattaggagtttgcttacagtttcagagggttagtcaatggtcactatggcagagagtgtgagggcaggca

SEQ ID NO: 35023 - DNA, 1111 bp, Mus musculus
ctgtctccccagctatgtccgacttccacgtacacccccaggccgtcacgggtgaggagggtggtgtggcccgcttccagtgccaaatccatgggcttcccaagcccctgatcacatgggagaagaacagagttcccattgacacggacgatgagaggtgagcctcttgtgggaaggacaggggataactgggaagctgacttgggatagactacaggctgggacagtgctattatgtaagctgcagtcagaatcatgggtccgagtggcttactaggcccagattctaggctcatgagattgtgtaagagtattgtgtgtgttgttatcaagactaggagggtatgttctcctgggagggtctcagtaatcatctgtgatcacagcaataaggttgggttagtgcccatgtctccatttatatccccatggcttgaggttgcaacagctgtgctgatagtcaacaatgccctcccctcacaggtacacactactgcccaagggagtcctgcagataacaggacttcgggctgaggacagcggcatcttccactgtgtggcctcaaacattgctagtgtgcgggtcagccacggggccaggctcactgtgtcaggtgagctcctttggcctgccaggttctctcagccaccccagttggtctactcccagacacacctagttccccagtgagaccacgtgtatacagaggtcctttgagcataagcccacaagccaaaggcgcctgagactggttgccagtccgctctttctgggaagcatgtcttccctgagctctcccaagtctagaggtctggctgggagaggaaggacgattgtcaggacccgcaggttccccaacatctctctccttgtttttcaggacttggttgggggttggtgcgtaccctgggtcatgatggggcgggctggcgagagtgagggagtgaaaaagcttccaactgaaataaggaaatgtgggtttctcctcccaggctcgggctcagggacctacaaggagcccaccattcttgtggggcctgagaacctcaccctgacagtgcaccagactgcggtgctggagtgtgtcgccacgggcaacccgcgccccat

SEQ ID NO: 35024 - DNA, 1127 bp, Mus musculus
tggattttgagctgttgtgactctcagcacctacctcagccggaatgaatgtccttgggggtagtggggcagtagcctccgcctctaccccacagagcccgaaagcactcctacctcaagccccttaatgggggcccctcccacctatattgctgcccagagtaacagaaaaaggagaaaaaaagaaaaaaaagaaaaaaaaccagaaaattaaaaaaaaaaaacctaacccccaaaagaaccactgtcccaactccaagtgtgaaagaaactgtctacctcagggctcacggccctcagtgtgggcctgtgctgtcactggaccctcccccagcctccttcatccctggcctagcctacctctcccccacagaggaggctgtagctaggtgaccatgggggcttacagaaatagagatgaaactggtcagaaagaaaatgtgaaacaagccaaaaacaagaggaaagctgttccttaaagtataaatcatcccaaactagtcgcatccctgcctgccacctgaactccggctcctgtgtctgtccgcccttgttctgaccttctcagacaacccactggccacctgcatccctatcgtcctccctgcctgggtttagggaaggtgggacataacctgtctcctgttctcccagacacagggcccagtctctggaatgtattgcattgtgtggaggtgggtgctctcccatagaggcacaccagctttctgggacccaggtaacctgacctgcccagtcagcaggggtggccaagagttatttttttatgaggtgtgtttacgttttatttctcttttctgttgtattgttctttgaactacttaggttaaaaagtaagaaacagaaaggaaaaaaaaaaccacaaatacctatttttggttacactcagaaacatttttttaaatagcagaagaaaaactttttttaaagaaaaaaaaaaaaggttaagtgtattctttaaaaaatgaggttagaacataaagtccctgaccccaaatcctctagggattcccaccctgaactctagagaattagctaaaaggtagaatttgtggcgtttcattagaaacccagactcttgtccaagtggacttgggaagggcagt

SEQ ID NO: 35025 - DNA, 1174 bp, Mus musculus
acctcacagttgaatggtatgctcttgttcaaatttattgcagtaattagggttgggaatatagctcgttgtagagtgcttgtctaatacgtgtgaggctctacttccaatccccagcatcacaagagtaaaaataaaacaaatgtagattttaagttaataaaacatagatgtacagaaacacagactataaaaatctgattctcagacttgaactaccagccagttctgggcgtcgccctctggtggcccagccggacactgcgtggaggcaccgcccccgcccgtgtccgcagggcggggccgccatattatttgcatacccacagaacactgcgcacaatacaaaaacatatcgaaaaattaatgtgttgctctgagaatatctccgtgaaagttagattaaatttataaaacaaaaagagtggttctgtttagctagaatagttgcgagtcaagtggacaccatcactgtgctaggagttgttcttacccgagctgtgagttacagtactggtaagcatactctggtttctcttcagatcgtataaatctttcgccttttactaaagatttccgtggagaggaacaactctgagtcttaaaccaattttttgaggccttgtttcggcaaggctatatttagaatgtctaacaacagaactactactgtgcattactgatagtttgtatatctactcactgctttaagtgacctacacagccaagcgttgaaatagagctctggtagacagcttgtgtgtgtgcttgtgtgtgttttaaggggaaaaaactgtgaggagaaggcatgtagattttaagcccatcctggtctatatagcaagcttcagggcatacatggactttgatcaaaaacaagcttaccattagccacagttaaaattctgctcagcaccagaccaacattctcttgaagagaggggctaagtcagacccaatgaaagactccgtgatgatggagaggggtatagccggatcatattgcagtgtttcctctggtggacccccttttccagcctgagggctagggctgaaggtcccagggaagccaatgtttcggacttgactttgaggctgacaaaagactccaggttgttgtggcagggagagaaaagatttggggagatgctgttctcagctagctgggagctaa

SEQ ID NO: 35026 - DNA, 1308 bp, Mus musculus
gacagataggctaactggaagaaagggtattcagttgacatttgtggaaatttgatgtgtcagcaatttcctttaacccctacctataggaaaaactggtttttctagctttcttaaggcctactggtgcacttgaggcaaatactcatttgaatcacagttttaaattgaatagctgggcagaggtgattttaatattaattgacataaaagtgaggactatgactctactgtcttggccatagaaaagaccaggcacactttggaggtagcatcagagtgtgaaactacagcttgtacttctgttgcctagaatgacagaacaataggcaattgacttatttataaaatgacctgaatgtaatgagaagccgttttaatatatggaatatgaaagcttttacactgattaaaattgaagcattgggggctggtgagatggctcagtgggtaagagcacccgactgctcttccgaaggtccggagttcaaatcccagcaaccacatggtggctcacaaccatctgtaacaagatctgatgccctctgaagacagctacagtgtacttacatataataaataaataaatctttaaaaaaaaaaaattgaagcatttttatggactcaattttcctcctaatttattaccttttctctttttttctttaggaaaagctgttactagaaccaatgttcgaagttcctaattctgacattgtatgtgtggaagttgacaaagaagtagtagaaggcaaaaaggaaccaggatacattcggtaaagcgtgttctcaggccagaatagcgccagagttagggtccctactgcttgagtttattgggctgtcattgaaaatcggttttgtaaggaaagcaataacctcctgagttttctacaagataaaagtaatatggttttatagaataattttgtgactcattttgaaaactgatctttaaaacagcctctatttttttctccaactatcagtatacaaaagagacacacatacacctgttgtgtgtaacgccttgcccagaaatttccacgtgctggcccctctcggctccctttgtcccaccctgcttagcttctggctgggttgcaaccagacaactctgagcttccttttctacctgccagtgctcctggagaagtcgaattaccagaccacacctgagacccttgaatccacagatagaaaacacacagacagcttcatttagaatgatggtgtctgagtggtagacaagaatccactattattttaggaattcttggattgatcacgcactcacagtgatatagt

SEQ ID NO: 35027 - DNA, 1117 bp, Mus musculus
gcttctttttgcacaggggtctgtcctcctgcttcagcggatgagactttcgagcaccatcttcagcggctgagaaagctcattaaaaagcgctctgaactgtatgaagctgaagagagagccctccgagttatgctagaaggagagcaggaggaggagaggagacgagaactggaaaagaaacagagaaaagagaaagagaaacttctactacagaaacgggaaattgagtccaagttattcggggatccaggtaagtttatctttgccagtggagatgaggaaagatctaagttgatagttctttattgtcagtaacccaacttaagccaaaaggaagctctgattacaagttgagattcttaactgcatggtgacagtcagggctgcagaggagatgaggtttatcttactgtcataatcagcgccttgcgagtgcactcctaacagcaagcagacatggtgacgtgctgtgcctttctcttccagatgagttcccacttgctcacctcctgcagccattccggcagtattacctccaggctgagcactccttgcccgcgctcattcagataaggtcagaagggcaccctctgctgtccctttttcttgggtacgggaagctcttgaggtctattgctgtatcttttttaaaagttccttttgggtgtgcagtgttgcctagtttcaagggtgtcacctgtatctctaaagtcctcattaattcttggaagtcagtgtctccatttgaacaggtaaagaaactgaaacttgcctgtgactgctcgctctgtagattgtgttgtccttgaattcagagatctacttgcctcccttcattgctgggattaaaggcatgcactaccatagctggtcttggtttcttaattttagtgctgagtcaacccaggaacagaaacctttttcctgaatggttgccatggaggcgaaggccatgctgaccctgcataatactctcaactgagctagctacttagaggagctgggtgattcttagctgtggaggctgtgacaacatcttttctgcattgagtcttttgagaagtcagtgattggatgccccaggcagtgtaaacttgctgcctagaagcatctc

SEQ ID NO: 35028 - DNA, 1362 bp, Mus musculus
aagcactgcagctctagatattagagatgcggttgtctcacgctctagtcttctacacaacttaactctgtgtggcattgtcctagctggaaagcctttttcttttgttctctgccctaggcaggggtacctctggagccagaggttcataaggttcttctggaaaggatctagatgaactgaggttattagcatgggctgtagccttggctctctaaatctgcctctgttttgagaggcttggttcaatgtggcctgctcatttgttccaggtttgttatatattggtgggtaagaacaggcagcacacttggctactgcttgaaggtgttcactgagtagagttagcagctactgctccttatcttcccataccacctgccctccagctcccaggagcacctacagtttccagtttcagtgcagtgtgggaggctgctactgaagatgatggggcagtggctgccaggatcactgatggcttagaactgttgtcctgtggagagcttagaaaacttgaagagttagcagagccagggtggcttgtgctctgacagacagtgcctgttttcctcatgaaagtgccagtgcaagagttgtgagggaactagttgtgtggggcctccaagaatagaaacttatttccctgtgggactgtaatctcagtcacatggtaggggctggatagctcaagcttctaaaaacatccatgtcataaaagccgggaaaagagcaaatatgaaagataaattttatttttatattcattaataagtgctgttgtatttggacatgatcagtcatatgacatgttatggtttttgttttgccttattctgggttttgttatttaatttcctaaaagctgaataaataccatttttgcttttttgtttgagcctttgcccctgatttattccctctcaaatcatttgacacatttcatcttcacattgctaaagcatttcactccaaagttcaattttaatatgcaggtgtttgctgcaggaaaaatgagtcttcaacacaaaattttgtctgcagaatctgactctggatagcaagacaggtccccatcagctttggaaatgatgtggacttgggagcccttaggtgtaatatgctaacacctttgtccctttctgtagtcgaccgtacactgtcccatttgtacattatagtgctgcactgtacagctagggagtggggctatttttcccagcatgccttaagtctgctatgattagcttcactaccccacaggcctgtgctcctttgttgaactctgcacttcctgctatgagatgaggtgcaggaggagactaaagatggagggtgagtgttggtgtcagccttgtcact

SEQ ID NO: 35029 - DNA, 1149 bp, Mus musculus
ctattacacacttgtaatttattaaaagcttgatttacaagcaagaagatgacagcgtgggagaaagagaagtggttgtcaggaggcggaagtctttcgctctccattgtgtgtagcagtcaagggcggacttttctacttgaatcacacaagaagtttaaataaaatttgtatttataatgttcagcttaaaggagcttgtatcctttgaagagtaagacaactaaatggtgtgcatatattctaaaaggttgttttaaatggtgcatctatggacttcgggcctagctcagtaggtagagtgcctgcttagccatggtgaagttctgagttcgatccccagcacctcataatccagatagtggtgcacacctgtagtcccagcactcagcagaagcaggaacgtcagaagttgaagggcatcctcagctgtccgcgagttctgtaggacattccaatttggatttttattattgctggaaaaaagtttgctttaccccagacttgaaactggactccggcttggggtggggctcagttggtagaatacttgcctagtgtgtacacagtgctgtagtcccagtacttggaagatgaaggcgggaggatcagttcaaggcatcactaccaagcatgtttaaggcctgcccagggctggagagagggctcagcggttaagaacactgactgctcttccagaggtcctgagttcaattcccagcaaccacatggtggctcacaaccatctggaatgagatctgatgccttcttctggtgtgtctgaagacagctacagtgtactcacatataataataaatctttaaaaaacaaaaaaaggcctgcccagggtatatgaaaccttgtttaagaacaaaagcaaatgaaaaatgaactctgttgctagcttctagttaagtgacttgagacaacctacttaaatctttaaaactctggtttcttagtttaattatacgggtaataactgccttgcagaatgctatattacacaggaaatgcccaacatggacacttaataattggtagtgtttgctgtcacttctcaagtttactaaaccacagagtggccgtatcttagtcaagtactctggttatgtctgaaggtatctctggatgagattaacaacgtt

SEQ ID NO: 35030 - DNA, 1142 bp, Mus musculus
gggttttaaaaattatttactattatacagctgaacaggagggaggtagaggggagcagtcatcccggaggaagctgtggttgatagtgtctgtacacactgacagataaaacactggttttagctgaaggtcggtttctcatcaacacttatatttggtccagagagaggctctgactccttggcatggccgtgctcacagcagtggtgcccattcagtcacctctgctccccatagccatacccagatgttttcttccagggggctttgtttgttggctttagacttacttgtgtacatgcagatgcatatacttcagaggtcagcagaggatgttacctgtctctgtcacctccacccattcctctgaggcagggtctgggactacaggtatgtgcaggacgccagcctctcacatagccgttgggatccaaaccctggtcctcatgactgcagcaagcactcttaacttctgagtgctttttaactctctagtgtattgttttcttgatggggtaaatacatttatttaaataaaatatttgttaaatttataactgctgtagataattgagcctgctaggtactgatggcatactctgctattaacaacaaacttaagcaactcagtgtttaggatgtgccttatgtttatttataactaggttcatctgtttggggcatctttgggaggctttttggctcaaaaatttgctgaatacactcacaagtctcccagggtacactccctcatcctgtgcaatgccttcagtgacacgtctatcttcaaccaaacatggactgcaaataggtaaggatgtgtatctttaaatgttggctttgggggaatttgatgcagtgggaataggaagtggacaagaaaagaatgctgtgaactccaacttaactctactcagtgtgggctgggcatgtagtcatgctacagtaacaaatgttgctatagtaacagatgttgttgctacagtaacagatattgtcctgtcctgcttaccttgtaagatcagctctctcaatcaacacagtttcatgtgggtttccccaacattctgtcatgctctgagataaatctccatacagtttgctttccttcctttctgatttaggccctgaggcgtgatca

SEQ ID NO: 35031 - DNA, 2044 bp, Mus musculus
tacttaccaagcttgctgccactgagggactatctcagaagacaggtggacggccaatggtggttcagtgagtaaaaactgtcaccaagcccgactacccagttcagtgccagaaaaatacagaggaagagacagtcatctcccacagtttctctgacttccacacatatacaaagtaaattgtaatttcttaaaggagccctcaggggctagaaagatgactcagcagctcagaatactggttgttcttaagaggtcctgagttcaattcccagcaaccacatggtgccctgttctggtgaacaagaaaacagcactcatacataaagtacctaaataagtaaatttttaaaaagggggacaggggccccctaaagagtgacactgatgttgctctctgccctccacataatctcagaaagattcaggactagagataggggtcgcccattggtggagcctttgtatagcactgcgaagccctcgcttcaatcccagcagcataaaacaaaaccctcacaacagctaaagtaatctgcactcttccagatacatctgctgcagttccatggaaccaagtacgctgccatcgatccgtcagtggtcagtgcggaggagctagaggtgcagaaaggccgcctcggcctcagccaggaagagccatagatggggcttgagatgccgaaccaccctgctcttgcacaatcagttcgggttcgttggtcgggcacactggtcctcacccttctggaagtcggactgattgtcaatctcatgacaggcgtcagctcttctaaaccagtgtgactggcccctctccacatttgtttttgttttaaacttttaaatttgaagaacttttaaagactcccattttaagaattgtgaaaattttgctaccaaaagtcttctccactctgttcatctcaaaagcttgggatcatgtggcgttctctcttttcctgctttctataactgctgcacccacctccaggttagaagaggagcaccggtcatttttatgctttcttgggcataaccagagggtcgaggctggcagcctgctggccactccctacacatcagcttttttgctttccagttgagcacatcattttgagtattagctgttgtatttctagacattacatttggaataaaaattgaatttcagccagtggcttctgtgatgagtgaggctgcccctctgggctactggccagtgctgtgtgatgtcgggtgaacaagtccatcactctgactgcagcacggctggctgttacctgctgactgccgctgtagcctacgtgctcttttaatctttttcactaatgggattgttaaaaaagagatagagtctcatttaggctaggctggccttgaactcattatgtgtcagggctagcttagagctcctgatccccctgcctccacctcccaagtgctaggattacagatgttatcctgaaagatcaccagatgcccgatagaagtggttttaatacatatggagaacatagtaaactgtctccagctcttgatccaatgtagaaaacgtccagcctgtggatagccttgtctccctcccgcacttttctacatcccttcctatcctggatggctataaagcatttccatgtgtcctttcaagagatatgataggatacttgagacgctggggagatgagtctgtgagtaaaagtgcgtgctggacgagcatgagcacttgagaccgcccagtgcccgtgcacagtgtcaagagtgtccaggcagcctgtaacctcagatagcccagtgcccgtgcacagagtcaagagtgtctaggcagcctgtaacctcagatagcccagtgctcgtgcacagtgtcaagagtgtccaggcagcctgtaacctcagatagcccagtgcccgtgcacagtgtcaagagtgtccaggcagcctgtaacctcagatagcccagtgcccgtgcacagtgtcaagagtgtccacatagcctgtaacctcagatagcccagtgcccgtgcacagtgtcaagagtatccac

SEQ ID NO: 35032 - DNA, 1180 bp, Mus musculus
atggcatggatgatggtcctgagtcggccttacaggccatgggcatccctggacctgccccagaggatgcggcagcatccccagcactgcccttctcggacttgccatcccagtttcatcctcgctcctcttcccttggggacctactcagagaaagccctcagcatccacgactgcccaaggagaagttgtatcgggcccagctggaagtcaaggtggcttcgaaacagacagagaaattgttgaaccaggtgctgggcagcgaaccaccgcctgtgtgtgccgagtcattgctcagccaggctgtagagcaactgaggcaggccacacaagtcctgcaggaaatgagggatttgggagaactgaaccaagaaacccctgggctagtgcaaaaacggaaggagctggtgaccctctacaggagaagtgcaccctaggcctgctaagccctaggcacctaccccccaagtacccccatctgtcactacccaaccttgctaagaaatgagctacagctcagactgtagacgcaccactgggtacatcaagtttggccaggacttgaggctcctgatggcctttctactctaccctagcctggggctacctgtctggcctcttctctaggctctgggcttgggatggagcatagtcctgtggtctgtgtggttgatgcagactgcccccagggctttggcaccatggttggagtttccaggatggcaccgtctgttctcactgccaacggtttacattcctgacttccgggtagagcccagctgacctgcctgaggctcccatcttctggtcttcaggcagattcccaccagccacacccacttaagagtatctagaggggccttgggtctggctgtagtgaaatatgtggcctttagctggagcctaaagatggctaagggtctgggtgaaggggctctttactctggtttgttgccctctctgcaaatcgagggtcttctctgcagcatccctacccctgttggagagctgtaattagatgctcagatctcaaggcttccgaggggggaagagaaactcaggcttcctggtacagtctctgcttctgggccagcttctgtccagccttgcacattcctgaagatgaaaaccctagagtgggcctgtgttaacagttgaaaagcctgtatgaaattatcat

SEQ ID NO: 35033 - DNA, 1203 bp, Mus musculus
acaagggggcagagaagggcaaagaattagggaacagggaagcggacttggctggcccagggaatgacctgaacaggagccagtggttcgttctgtgggtgggaacagggtctccccaaagccaagcacagtcatgtggtggtggtagaatgagaaaagcagacagcgtaaattgaagggttctcaaatctttagagccgccttgggtaacaatacgccacgcgccacggagccgcagccccatccctaccccaccacgcccactcgtggaactctaaaacgcacccaagaccaaacacaaaaagcctgcttctggttaactgtcctcagagagttggaaagacgaagaaacgccggcccgtagacacgcccccgcccctgtccctgattggctagagaatttaaagaccaggccggtgatagggtggtttttctattcctagtatttgaatgttcttcctgctgaagctttctgccggccggttcagatcagctttttcatctgaaagcaacgagtctatcggatccttgaggtgggaggcaaagaacgcgattattttagtgatcctcgctgggagaggtacagattcgtgggtcagacggagggacaatggattcctgggcctggaggttccagacattccctaatcatttaccctttccaaagcactggaaccacactgaccctgatacctactaattggttattgaagggggtgtgcaagtctcagcctgttttcacttccagccagtctctttcccatcgcccaacgtgtgattattgttctgcttcctgggtagaagtccctaacgagtcccctgttggcctgggtgagtctcctcaacaagcttcttttctgagcaggaacacctttctaatgtggacattgcaggacaatcgctcgcgaatcctaagtgcatgtgaccccaccttccagcagcagaggacgtttctcctcgctccagagtgcttggaatatcttggtggcaccttctgttaccagtgacaacctgttgacactaagaggtctggacaggatttcccgtcaccgcagccataccacctattacatctcgattttctgtgacttatgcgctccggtctctgcacgcctgcagaggcattggagatgccttctagcacagaggcggcgaccgatgaatgtgacgatgcggagctccggtgccgggtagccgtggagg

SEQ ID NO: 35034 - DNA, 1361 bp, Mus musculus
cgtccattcaaggtgagtcaggatcgaggagcccccagagcccaggatcagggctgagcagcaagagttcatctctagtgtggattgaactgtagaaaggtgtttcagaaactggggtcacagatctggctctgtctgatggttctgctgactctcctcttatgccagttttttggtcctgccgaacctctgtttactcatctgtaaagtagagatggtaaagaatcttaacagactttgccatgtgaagaattcttgagatttgatgtagcctttttttttttttttttttttttctgaggaaactggataagggacttgctctcaaatggcaagttagtagagccctgggaatgccctgggcactgctgtaccatgtgattcagaacacttaaggcctcaggaactcagcctcaatgtgagggttgcctttggaggattacagaatgcttcaggggatcactgaggaaagatgaggctgatgggggagacagtgctgggttagcacagcaacagcttctgaccccctgaaatggccacctctctccacagggctatgaagggtccctgatcaagctcacctcaagacaggtaatttctcttctaggtttttcctctcagctcaggttaactgctggcatggaactgaaacgtttgtcctactgcttgaaggcatctgaaggtggagacccactccttgctgtcttgcttctgccctgacagaaggacagcctccacagctctctccttttctagccagctgggccttgtcagcctctctcctttctgtctggctctggcattctggaaacagactgcctggccccagtggctaaagtctgtagagatgagatgatagctgggctctggcctcctggaggaaaccaggagtgtgaagtcagaagctttcaaccttatctgcatgtatttacaatggttcctcctcctcctcttcctcctcctcctcttcctctcctcttcctgctgctgttgttgtttttactgttattatgttcttatgtttgtggtatttcgggggagggtgtcaagcccaaggtcttagacatgctagacaagtgctggacctggggtgcagatgcaaggcagggagagatgcaaggccgtcctctctttttcttcctactagcctgttggttttgtgatctttgacagccgggcaggagcggaagcagccaaaaacgcattgaatgtgagtagacagagggcctgcctgcctttctctgacggggtgattgaccccgttctgtccattgcaggtctccccttactgcccactaataaacatgtgggtttttatttcccacccatccctgggcggagtctctggctgcctggtgtat

SEQ ID NO: 35035 - DNA, 1831 bp, Mus musculus
tgctcacatgcatggatcctctccctgttcctgggcgcttgctggggctgtaggctgagggggagggaggcacctggctgcttcatccttctgtcctacacttactaccctgcaccccctccccctttgcagcctccacagccagttcccattccactctgctgatggcgctctctctttcccttcccttcaggtcttgtcaccctggagttggtcctgggttgtgtggggccaaaacagggctctgccctcactgccacccgaggcctgtgcggaactgctgcttccctctagacactgtgaatctgaagcctgactcagtggatggctcttgttttcttcctcagttctccaaggccttcagaaggatctgaggccttggatacctaggtccagtttgcaggcctcactgggacccagcgcagcctgtcctcctgctcagacttgtatctgtagctccccatctaggaaaagggacatttaattttgcatgtttatgaattgtgacacttgtgcaaatgtgtgtatggtttgttcccaaactgtcgccgtagcaacaggtcttggcactggaggctggtccagcctactgcttctttccactcctgcacccaccctgcttcaggggtccctgagcctgtggtcatttctgccttgggggtcccagctcctaacttgggagcacacgcgcacgcacatacacacacgtacacagactctgttctcatccaacagcagatccacagcctctgaattccacttcagatcagagccctgcatcgtctccttctccaggctgacaggtctgagaagcctgccttgcgcttgccttccccagtgcaccccaccctgccactgcacctcattcttcctgaacttcgaaaccaaccaaaacgtgaaaagtatttttgtaccctgtgtaacaaaatatttatggatcataaagggtttttcatgtgtttaccattaattattaaagagaccttgttcagcctgtcagataagtttaatgtttagtttgaagcatgaagaagaaaaggggtttccgttctttagcagttggcctttgtgtcgggctttggtttaagaagaatgagatgaaggataaattgtgcaattttgttttattttacgagcatgtctgtgctttacctttaaacctcagctcggatatctggctacttcggacaatgatgtctggaggtggctgttgtaattggtgaccctgtgagaatgtgaaactggatcataaatgaaatgcaaaataaaaacctgaagtgactctgctctgatttttgcttctacgatccatgggatgcaggctgctgggctgagggtgacaacagggaggccagaaacagtcctggcctggtggcaatctgggtggggacacctcagagctgctattgttgccttctgtaataagctgaggagcctgtcccaaagtggagagtgactgcaccagggtcttcaggtgcccaccctccatcatcccatcctctatgatgacttttctccttgctccgggaattctgaaggcagagatccttagtccctgcacccagtcaggagcctgagtgtgcctttatctgctcaccttcacccttccaaccctgtggtctctcaagcccccttgtactgaaaaagtgaagttggtgtgctagggtctctctccagagtctgaccttggtgtacatctactggcctgtagggacagaggatccacaaaaccttgcccctgatgcattaaactaaccagtgctgttagctgtggactgcaactgattcctgggaagaaagcagaaggtctttaaggttaggttgcactggg

SEQ ID NO: 35036 - DNA, 3732 bp, Mus musculus
tgtgataccagcagaccacaattagctgttttatctgtgtgtttccttcgcagaacaccaagtgcccagatgaagtcagcttcatgggccagactggctcattcgaggtgatgctggaggtgccatcttaccatcagttacggtgttgatcatcctgtttgccattccgaccgtgactgaaggcagacccttggctgcctcacctccactagaccctccgacccccgaccctccctcttcctcaggagctggagaactggtactttgcaaaaatatttattctctcagccacagttttgttgtggtcatctatggagatgaaggcataggagcaactgagagaacacagcctcatcccagagaaatgactgctctgttaccttagcccctggtctgctgccagagcagcaacacacacctgggagggaccccaagcacgggataaagtctgaagacagcacagcagccatacccctcactgtcattaccaccataaacaagattccacatctcctcagtggtttgggccctgggaactggcagcacgtggagaaattagaatctcaggaaagaagtagggagctgtttcctctgtaattgcgaagacaaggtcttcaagtgtggagacatccccctctgatgtgagcacagataaatgctcagagcctaacctgtaaaggggagagtaaggcacttgccccaccagagtcttgtgctcctgtcaggtggaagacaggggttctagcaccagcacaggctccctggggatgctgggaggaactggaacataagtggagtctgtgaaactgaacctgcttcctcaccaaaattcctgctgctttccagatcccccaactccttgtcctttctctttcttttttaaccccttggtgcctttcccaggggggattccccatactgacctcacttctactgcttggcttctacaactcaggcagtattaatagacttcctcccagcatgggtaaccttggagcctgccacatcactttagagcagcaaccagaaggcaggctgttcttggagacattcagttatctgagtatcctcatttagggtcacaaatatatccatcccagttcctctgtctacaggtacatgattttatacagttcactctgtaactccgtacgtgccaatatgaggagtgtctttataacacacgtttatgttttaggggccactggccaaggggagatgatttgctccttagaccctaaaacagcatatccaagcattatatgcccaagtcagagtggacacagtggataaggctttgaggtggcaggcatttctctgttctcctgagctacaaagtcatgttaggaaaaagtgatgacctagctttgttggagtcacgtcttcccagcatgtgggatgttttttaggtctttgctattgcagggtaccatccctttgaagccctttcctcctgtttttgccctttggactgcaagagagagagaaagatgcacagataccagcttaggctaatcgggagcttgaaacaagaatgtcaaaagtgacagtttgagagcaggaaggtaggtggctctaacttctttgggaaagtggggtggtgggagacattaagcacaaagcccaagagaagctagctcccgagaactcatgaaccctccatgtatataatcaggctttggtagttagcatctctgacctccaaacctttcctgtttccaagtccttgttttttttttttgagttgggttctgggcacttgggaaaatccttttgtctaaacagcctcctcgccaccattgtcccctctgccacatgctgccccagcaggagtctgggtagtgaccccctttcattcgtggaggtagatgttggagataacatcttatctaacccattacccttactaagaaagtgactgtcgcctaattatgcttctccccacaagactagtgagtagagccatgctcccatctgttcctgttttttttaaatattgtgttttgtatgtatctgtggcactggtttgcagtgtgctttgtacatattgtaaaaaaaaaaacattggagcaattttgtttttcactgggtaggcatggcccacattcctgccctttccacttttttcattttataacagaggtgtgtctgtatttgcaagacagccttagattctgcagaaggaacagctttctctctctcccctctccccttcccttccctccctctgtctgtctctctcccctcttcccgttagaaacaagtcagctttttgttccctctacccaagtgccccttgaaaaacaggtgctgctctgaaacgagattagcagtagaaaaatgaccctgtgttctcagctcctccctcctggtccctagtctgagtccggtcttcccgctctgaagtagtattacatacactacagctccagctgtggaaactcctgactagtgcttcaaaactgtccacctccacacctagtcagaaagacaggatctggtgcagaccaccaaaccaagcctctcactaagccaccctgcccatgctcttgctcttaatgatctccagggactcatgtggaagagaagctataggaagtaggggcctcaccctgaggaagggcagctaccgcttgccagctgctgcttaggactcacatctacttcctcatttccccatcttatacttgtacatgtagtctccactaagcctactctctccacacatctcaaggtcaaagaaacatagaagggtaagagggtaccctgtgaaatgatcctttcatgcaccttctctccaggctccagggtggggtgggggggacttagtttaagggagttagttctgcagaagggctagagaattggatatagatttgaggcctcatcacttaccccatataccttatctgtgtactctgatggcccccaagattcagctgggcagctagctggcccattattctgggcctttgtcatttattactagtttccaaggaaactttccagtgattccctgccatgggcccctcccaggccttatccctagcccctcctgccccagcccacccgcttgccttggtgctcagccctcccactgggagcaggttggggcaagctggaggctcgggctggagggacagtgttgctgttcatagcttttgttccattggcgttgctctgttgaatttaatttcagtcttcctgattcttcccttctgtaaagtgtacattaccaagttccttgtttttttatatatatatatataaatatatatatatacaaactgtactctttttgcctttgtacattcaggcaagaagagaaaataaatctttttaagagacaatcacaaatctgtgagggctgctggttatttctcctggagtttgctgctgagctgctgcctcctcccctagctgttctgttcccccctcagcttccctgtcttttctctagccctgctccatacccaccctcagcttcccctttcctggctgacagcaagctgttgaacccagtgtgcccacctgccctgtagcttcttcctgtccagcattgttttccagcttggccactggctgatcctgtatcctgacctttttttaaacccttagatctcattcaccaaagtggctttggacccctgggtgctctgggacctgcctcccagaggcccttggcttgggacatccattcatctatgaaactatgcacctgggagctctctg

SEQ ID NO: 35037 - DNA, 1211 bp, Mus musculus
gaaacaagcaatgatgcctttgactctttggaaaggaagtgtatggaaaaggaaaagtgtaaaaagccctccagtctgaaatctgaaaagattccatccaagagcttaaaatcagcccgccccattgcccctgccatccccccacaacagatctacactttccagacagccaccttcacagcagcaagcccaggttcctcctcaggcttgaccaccaccgtggtccaagcaatgcccaacagtccccaactcaagcccattcagcccaagcccactgttatgggagagcctttcacagtcaaccctgccctgacccctgccaaggacaagaaaaagaaagacaaaaaaaagaaggactcatcaaaggaacttgaaagtcctctgacccctgggaaggtatgccgagcagaagaaggtaagagcccgttcagagacgcagcaggagatggaatcaaagtggagagccttctgaacggctcctcagagtcccaccaaagccggttagctagtatcaaggctgaggctgataagatttacagtttcactgacaatgcccccagcccttcaattggaggcagcagccgcctagatagtactaccccgacccaacccctaactcccctccacgtagtgacccagaatggagccgaagccagctcagtcaaaaccaatagccctgcctactctgacatctctgatgctggggaggatggggagggcaaggtggacagtgccaagtcgaaggaccccgagcagctggttaaagaaggggctaagaaaacactgttcccccctcagccacagagcaaagactccccatattatcaaggctttgaaagttactactctccaggttatgcacagtccagcccagggactctcacctcaagcagccaggcaggaatggagggccagcccctaaagacaaaaaaggatgaggagcctgagagcgtagaagggaaagtaaagaatgatgtctgtgaggaaaagaagccggagctgagcaattccagtcagcagccctccgtcatccagcagcggcccaacatgtacatgcagtccctgtactacaaccagtatgcctacgtgcctccttatggctacagtgaccagagttaccacagccacctcctgagtaccaacaccgcttatcggcagcagtatgaagaacagcagaagcggcagagcctggagcagcagcagcagcagca

SEQ ID NO: 35038 - DNA, 1879 bp, Mus musculus
tcccttaaccacagtaaggctttttttcttcagtactagaatgacaaggaatctgtacactatttttagtaggggttggccctgttattagagagctgttaaggcttttgctagatcatgttctgagtcactgataattcaagcagctaacagtaaagggggtgtgagcagagttgcaccttccatctgtaatgtgctgcggcctgtactgattcagacaggagtaccagctggcagtggtaggagaagttaagcctttcaggaaggggcaactaattgtagaagactactagttaacactcaccacagactcttgggcaactagaaattctgtattcttccctgaggaggtggaatgggaattaccttctcgaggtccagtgtgacatggttggagatatcattgaacttgtcttgcccactgaggcatgatagccacacaggaagggtccagcttgtattaggagtttatttcaggctatctccttgcctgtattgttttctttaacagctttttaacattttctttttccagcaatgatgttgtccactggacatgttctgaccaaggaggcaggtctgagaacgtagctgaagctgaaaataggaaagctgggggcaaggaagagccttgaaccttgaggtgggacgttgactctaagatgtccttgagcagtggagcctgcggagggaaaggagtggatgcaaacccggttgagacatacgacagtggggatgaatgggacattggagtagggaacctcatcatcgacctggacgccgatctggaaaaggaccagcagaaactggaaatgtcaggctccaaggaggtggggataccagcccccaatgctgtggccacactaccagacaacatcaagtttgtcaccccagtgccaggtcctcaagggaaggaaggcaaatcaaaatccaaaaggagtaagagtggcaaagacgctagcaagcccactccagggacttccttgttctctccaagtgagggagcagccagcaagaaagaggtgcagggtcgcgcaggagatggtgccagtgcgggaggcctggttgctgctgttgctcccaagggctcagagaaggctgctaaggcgtcacgcagtgtagctggctccaaaaaggaaaaggagaacagctcatctaagggcaagaaggagagaagtgaaggcgtggggacttgttcggaaaaggatcctggggtcctccagccagttcccttgggaggacggggtagtcagtatgatggaagtgcagggatggacacaggaaccgtggagccgcttgggagtatagctattgaacctggggcagcgctcaatcctttgggaactaagccggagccagaggaaggggagaatgagtgccggccactaaagaaagtcaagtctgaaaaggtaagcggtggccagatctggctgcccactgcccatcagaactgccccggactaaccgccaaatgctgtgtgcactctgtgggaggctcgttagtttgtgggtaatgaccaattacaaggtcagagcagctggtaatgataatgtgattttgttccaaattagagaattccctacagactcatttgcagcaggcacagacctcttggaatacaatttctgtttggggatcagctacttggtagagtgaattttctcacaccttattattgtcacatgtcaagacacttgttgctagatgctgacattaaatcttcatgtgatttcctgcttggctgaaatctcctcatcaggatcatgatggttgataaatgtaaaaggctttggttacatgttcaacctgaatgatgttcttagtggggtaaatggtactgctgagtctatggcaggacaaagagttcattgtcatggt

SEQ ID NO: 35039 - DNA, 1152 bp, Mus musculus
cctggcagtaagtgccttcacctgctgagccatctgctggcccattattttgtttaagacaattgcatttcatgtggtacaagtggactcaggttcagtctgtagcctagagtagtcttgaactctgcctacctttacctcctgaatactagcattacagtgactaccaccatgcctgattgactggttttatgccattttgtcatgtggagagtaatggtatactcagtgccccagcaatagggaccctcatgatgtccttttatagccatatcttctataatgctgccccatttcacatcttccatagagggagggagggagggagggagggagggagggagggagggagagagagagagagagagtatgtgtgtgtgtgtgtgtgtgtgtgtgttcgtttctcctatttgttttgttccccttccaaacatagagtaagcagacttcctaagggaaaagcaggggtgcgttatctgctatgtaggaattaaaattcaaaggggaaagtgggatctccagagactgttggtgacagcaggttgccaacatcctgagctcacaagtgttgcagctctgtgctctctggcaggcttcggacgctagccaagagtgtctgcacgttacagcataaaactcccttgggtttcagaatgccagtcaagactagctagccccttgcatgccactgacaagaacaacaggccttttgttttgtgttttgttgtgttgttttgagacagggtctctctgtgttgctctggctgttctggaacttgctttgtagaccaagcttgcctcaaactcacagagatcttctgcctccccagtgctgggattaaaagcttttgccaccatattcaatttaaagatttattttttaattatgtagctgtgtgtgggtatgtgcatataagtacaggtgcctgcagatgccaaatgggggcatctatctgatatctaggagctagagtgataggtggttgtaagatgcctgatgtggatgctgggaaccaaacttgggttctctgaaagagcagtatgtgctcttaaccattgagccatttcttcagtccccaaataaatttcagcttcgtcttttagagtatcctggaatgtttaggagactgttcattttattaaagttgttag

SEQ ID NO: 35040 - DNA, 1148 bp, Mus musculus
taatagtttaccaagtagtagcaccttgaattccatgctgaaattgtctggctttcttaatatcacaataaaattgaaaggtaggatgggaagagaaaagaaggggttggaagttctctgttcttttatttgaagacagcctttacacagaagagtatggattgttttttctatgtgggtaatttgaatgcacaccttaaaagaaaaaagtcaggaatgtcaacagatgagctcatctgcccgagctttgcaagtttctaagaacccacctcagcttctcaaacacacagccagaaccacataaataaatggcagagctactcggaaacttctccttttcatggttaggctgggaaagtctgtctttggtttacatggcagtggtagtataaggtctctcttctgtttgctgagacacaagggaggaagtgtgggagaagtttgcgggtagatggccctcagttgctcactgatgaatagtatactttaaagtcagatggaaattcttagtagcctgagttcaagcttgtccaagaatagcttgttagtgtattatgacacttcactctgaccctgttactctggggcagtttcgcctaagaaagttctgaatttccgagatgcctttttgttgtagcttctgtgttcccttttgaatgactgaattaagatgccattaattcatacagtaaaggaattggctttttctttttgtttttcccagacaagactcagtttcctttgtatgagctcacagtagggaatgatggaaactatgggctttgtcagcgttgatgagaccttatctttagtgaagtgtttagaatagattaagaatttggccagatgtgatagtatacaccttaatcccagcactggggaggctgatctcttactatctcttatatagtaagtccctatcacaaaggagaacataaaaagaatttgggtttttgttgcttctttagctaatacagaactaagataataaagaactaagtgtcctatcttttctttttaaactgaaattttagtgtaaacctattttccccctagcatgtaaatgtgagacactacagagattagttttacaaataagtatagctatggacttatatgattatgacatttaatttttttccatttta

SEQ ID NO: 35041 - DNA, 1191 bp, Mus musculus
ccatagtgtgcacacacttatgcgtgttttcacatgtgtaaaaatttcttttaggccagacagtggtggcgcacgcctttagtctcagcactcgggaggcagaggcaggcagatttctgagtttgaggccaacctggtctacaaagtgagttccaggacagccagggctgtacagagaaaccctgtctcgaaacaaacaaacaaacaaaacaaaacaaattcttttaaaaacataccaagctgattgctccattttccttgctctaggtatattaggctattgagagctactaacaaataaagcaattgctaggtttaattaccttgccttatcagggcacctgattataagaaacctgacttttccccttctctcataacttttgagtaatttgtaagtagttactcagcagaagtgaggcttgcctccctggttcttttctttgtcgctgatcagtgctcctgtgatgtctttgtactatcaggcacaagaaagcaacaactccgtaaagaagaagacaagatttgtcaatttatatacaagagagggacaggacaaacttgcagtcctgcttcctggtcgtcacccgtgtgattgcctgggccagaagcacaaactcatcaataactgtctggtctgtgggcggatcgtttgtgagcaggagggttcaggcccctgcttgttctgtggctctttggtaaagtccttctttcatgttttgtttttactctgtgtcctggttgggtggggtttttttgtttgttttgttttgtttttttttttttttttttaagatttatttatttattatatgtaagtacactgtagctgtcttcagacactccagaagagggagtcagatcttgttacggatggttgtgagccaccatgtggttgctgggatttgaactctggaccatcggaagagcagtcgggtgctctaacccactgagccatctcaccagcccgtttgttttgtttttattgttgttgttttttgtcaacttgaattatctgagaagtgtgtgtgtgtgtatatatatatatatatatatatatatatatatatatacatggtgaacagatatatgcatatatatgtgtgtatatgcaaaatattcgaacattcagacaataaaaataaggatatattaaacaaaaaaccctttcctcctattaaattgttttta

SEQ ID NO: 35042 - DNA, 2621 bp, Mus musculus
aggctatagagggagttccagccagccaggactaggactatacagaggatctctgtcttgaaaaaacaaaaagaaagaaaagagttaaaagaccagtttgtcttgaggacttaactagttgacaaccatacaaagagataaaatactaacagaagcagggacaaagactccatagatacattaaaaggatttttttggatatacattcagttcgttatcataaaacagtactttttttcatgtactactttttctttcctatgtaccccctgacagctcctctgttagcccggcttgtcttggaactcacttggcagtcaggctgaggtgggattcaaggtgggcaccaccacgcccttagataaaataatgagacaaatcgtgctgcaaatcaggttttatatgtcaggtccttagcatttccccgtcatttctcaagatgacttgagatcattgaacttatagatatagtagtaactgttttgagataggatctcattatatagcctcttaggtggccttatgtagaacacgctaaccttgaattcacagagatctgcctatctgtctatcatctgctaggattataggtgggaacatgcatttttactttttattttgttatatttatctcattttcgtgtgtgtgtgtgtgtgtgtgtgtgtgtgtgtgcttgtatgcacacgaaattgtgtgtttgggtatgtgtggaggctcaaggatgctattgaatctcctgtattcacaacacaaggaaccatgggtatgtcaaccagggtagcctcaaacttcctctttttttttttttttttgtaatcctactgtctcagtctccctgggtgctggggttaacggtgtgtacccccataataaatgatatacttgactttctcctcatggtttgacagactatcactttttcaaaattaaccatgtttttggcagcctatcttttttacattaaaattttcaatattacctaagtaaaatctcttgtcatttatcagaatgggttggggaggcaaagataaaatgctgaaaagctagttgtgtatctttttaagggtttctctgtgtagccctggctgtcctggaactcactctgtagaccaggctggcctcaaactcagaaatccaactgcttagacattaagcagaacctctttcaatccaaagtactttgaaaatcatgtttcttgtttctctgttttttgtttgtgcttttgcctttttaaataaacatttatttttattttgcatacatgaatatttggcctgcatgtatacatgtggactatgtgtatgagtgtatgtggtgtgtgtggcctgtagagggcagaagaaggcctcagacctcctagacctggagttagagatagttgcaagctgtcatgtgggttttggaaactgaacctgggaccttcacaagaacatcaagtgctctcaaccatggtccatcctccatgccctaagtttcagctttttttagagagggtctcaccaaagctcagattgaactgaaactccatgtagcccaagttggcttggcaatcatactgccttggccttccaagtgctcagattgcaggaatttgctaataaaaggggtgggattgtttttaagaagtatgggttttgtttgtttgtttgcttgtttgtttagttacaacccccttttaagaattatttatgtatatgagcacactggagctgtcttcagacacaccagaagaggtcattagatcccattacagatggttgtgagccaccaatgtggctcctagggataggacctctggaagagcagtcagtgctcttaaccattgagccatctctctagccccttgaagaagtatgttaaattaagttttttaaggttagattttagtggctctgagatctaatttgctctttttcactagtagaactactttatgatggtgagcctaattttgatgtgtataattgtttctaaaatgtaaaatgaacttaattgtattattgagtgtgcatacatatacgtatatggtgtggatgtgttgaggaacatgtgtaaaggttagaggacaacttgtgagaatcagtgctttccaccatgatcaaattcaggtcctcgggcttggcaggaagtaccttgacttgtactgagccatctttccagcccctttctgccccccaccccactcctttgagaaaagggctccctaaattctactatacttagaatcttaaagattaactcttctttcttttggttttgaagatagagtttcagtatagccttggctattctggaacttgcactatagaccagaggctggcttcaaactcaagagatctgcctgcctcagcctcccgagagctaggattaaagggatgtgccactactgcctggctgagatgaactcttttttagaaaaactgcaagtttaactgggacttgcaagtttaaccaacattgttataattggtcttttattttttctttttcttttttttttttaatctttgagaatagcatatagaaatcaaagaaactgtcatcaaatcaaatttgtaggactattagaaaccatcttgttcaatgcaggccagccagtaagtgttcactaaatggact

SEQ ID NO: 35043 - DNA, 1167 bp, Mus musculus
aaaccactccccaaggctttatgcttgcttccaaaaacacaagagaaaaaaattagcctagctgtgagaaatgttcaaaggacttttgcttttcagccttaactctgactagagggagtttgccctgagcatttgtaattggagatgctctgattaagatttaggacactatttggtgttgaaaaaaaaccctagactaagacttgtttcaagtgaataatcttggtattattcctaggaaacgagagaggtaaatcccagtccttgctgtaatcggtctacagaaggagttcctggacagccagggctacacagagaaaccctgtcttgaaacaaaacaaaacaaaaaaaggggatgtagttagcatgtgcaaggccctggcttttgtactgatcaccaaaaaaacaaccaagcaagcaaatcaaaatattgtagatacaggttagtggttcttggacatggcacatggtcatgttttgtcaatactctttggagagctgaaaagaatatatttttgagttttgagagcaatgataattaagaggaatagggccatagaagctgaggagtttctctgttctttctccaaatttattattagcatacaaggccctgtgcacttgaaagcgcatgttactgcttcctttaattagatataattctagttctctgattggacttgcctagtgactcttaagtatgtagtgtgtatcagaatcccttagagagtttatcagagttgtactgttaagactttccaattaaactctacttgctcaggatcccaaaatgtttattttaaacaaattaccagaagatgctcatgttcttggccactagatcatgatttaagattctctgtattggccgggcagtggtggcacacgcctttaatcccagcacttgggaggcagaagcaggtggatttctgagttcgaggccagcctggtctacagagtgagttccaggacagccagggctacacagagaaaccctgtctcgaaaaacaaacaaacaaaacaaacaaacaaagaaatctctgcattggtgactatactctcatgaccacatctctttgtaactgctaattcttttctttgcagtcttccctcatcctgtttttgagatagggagggtctcattgtgtagccccaattggtccagaa

SEQ ID NO: 35044 - DNA, 1124 bp, Mus musculus
caaactcagccaggtcttctggatgggttgtctggggcctaggacttagagccttgggggcacggagctccgattgtggtgctggggattaactcagggccgcaagcattccaggttaagcctctcacagagccaaccacacgggcactctcaaacgtggtcccaggttgtccagcctagactctgactcccgagttcaagtgatcccctagcctcagcctcctgaaagctaggaccataggcatgtgcgaggcacctggccaggctgtttattcttgacactccccacctccatgccaggttaggaagaaccagtgcccctgacctgtctgtatctgtggcttaggcgcctttggggaaaagatttcctacttgaagcccttgcccgttccagctggatccttggtgaggactaccgaggtttaacctccacattttaacttaccatgccctctagaactttgccgaaaaccacatgcttgccatccagccaggaggtcttgactgtggttatgaagaactgtgagccattggtgtctttgcctgcattggccatgctcacccagccaggcccgtagtgcttcagcttgaagttctcatctgggaagcgctcaccatagatgctctttcctaggaagaggcagagcaggtcagggagggggggctgaccccaaacagcaggtgcctgggcgaggatctgtccttgttaggctaggctttggtggcaaacaaggacagatgtcttctgtcttctacccaagctgtcaggaccaagaccacctagggtgtgaggccaggctgggggcgtgggtgtagaatccttcagaaaagggctgctgtaaccttcccagggttacaaaacaggtgcagcttcggggggaggggggagttagaactcctatttgtttttaccaaggaacataaaataaaagatgcccatgaacatttgtcattgtgtggtcttacccgcgttctcgcgaccggccaggaaagacgcaacaaaccggaatcttctgcggcaaaagctttattgcttacatcttcaggagcaagagagcaagagagcaagagcaagagcaagagcaagagagagcaagaaagcaagaaaaagaacaagaaagcaa

SEQ ID NO: 35045 - DNA, 1383 bp, Mus musculus
gcaagggcttcaagtaggaaatcttttccccaaaggcgcctaagccacagatacagacaggtcaggggcactggttcttcctaacctggcatggaggtggggagtgtcaagaataaacagcctggccaggtgcctcgcacatgcctatggtcctagctttcaggaggctgaggctaggggatcacttgaactcgggagtcagagtctaggctggacaacctgggaccacgtttgagagtgcccgtgtggttggctctgtgagaggcttaacctggaatgcttgcggccctgagttaatccccagcaccacaatcggagctccgtgcccccaaggctctaagtcctaggccccagacaacccatccagaagacctggctgagtttgtccggctgcggggtcctgtttggtcactcatggagtcaggggtgttcggaatcacgtctgagcagcgttggatcagctgtccagcatcgtgttctgtgttcacctatgtggggctctctcccaggagtgtgcctcttgacccccgctcaacctctcctctcctgcctttcctgtctaggatgtggtacggaaggtggagagcaccaagacagacagccgggacaagccactgaaggatgtcatcattgtcgactccggcaagatcgaagtggagaaacccttcgccattgccaaggagtagagagcctgggggacctcatccctctaagcagctgtctgtgtgggtcctgtcaatccccacacagacgaaggtagccagtcacaaggttctgtgccaccctggccctagtgcttccatctgatggggtgaccacacccctcacattccacaggcctgatttttataaaaaactaccaatgctgatcaataaagtgggttttttttatagcttgggtgtgggctgtgtttgggggtgtatataacacctgtcctgagtgtgtgtccctgtgtgggactcttctgtgctgatggacgcatgctcctcccccgggttcctgccttagcctgtactagtgcaacccacccactcaccaggcagagactttctagctagctcctgtgcctcatcttaagcttacacctgtcaggctgggctagaaaatacacctgactcttctcagcctacctctgaaattacctcacacctttctctttatcttgacttcgccacgacccctgggcttttaagagtcttgagttctaccagctacagctgtcagtgcaaaccaggctcagagctttgagtggggatgggcacatctgagcctcagccagttacacctgagtctagtccaagggaagacccattttcctgagactgaggcacatagctgtcctgaaaggtggcccaatgcctgggctagtcagggcactagtg

SEQ ID NO: 35046 - DNA, 1176 bp, Mus musculus
tgtgctgaggaagcctggcacacatccagggaatctttgcagggaatggggagcaaataaacagggccacaaggcttccccccaccttgctgtggactgcctttgaagtctgtagagtgcaggtggcctggccagcaattgtcttctaacagcgctgcttctgttccaagactagaaacaggaagccagtaatgacctttggagagcctagagcaggtgagtgagtgtgtgggtgaggtgaaggcagtaagtaggttgtggccattttaagtgtttatgtaaagtctccttaagctgtcagcatggtgacttatgccggtaatgccagcacttgagagactggggcaagaggttcaggagttcacggtcatcctcagctctacaatgagatcaggcctgcctggcctacctgagaccttgtctcaaaaggaaaacaaattctgttaccaggcctgttgtttgcatcagtttaaaaggctgcatccttgctgtagacttagagcctgcagagctgagcaaggtcaattaagttttggtgcctgcttgttttcctagtactctgcatatgtgtaagcggctactgtaatcgctaatacgttgaaggctttccctgagagtgggaccatgtgctccactcccacggtattcatagctcctcacacgtggcagactcaggaaagtgtagactcttggtctgacttggttgaggtaggcagtttggaaaccttattagtgtcaggttttggcatcaggccaccctctgtgctccagtcacccagccctggcctggagtcgcatggcgctggcccattcactggaagcttgaagagggcctgacccaagcttgtgcttttagacattaaatgcctcagctaacagtggctgcagaggctgcccttgctcagtgcttccctggcacagctgctgggggatcctccttctaaggcagagccagccaggactgctgaagagctggctgtgctcctcccaactgccctcccccataggctgccttcgaccagcgcatgaagacatggcagcgctggcaggatgctcaagccacgctgcagaagaagcgggagtctgaggcacggctgctgtgggccaacaagcctgacaaactgcagcaggctaaggatgagatcacagaggtgagtttcccaccaaagctagccc

SEQ ID NO: 35047 - DNA, 1192 bp, Mus musculus
ataaataccagagtcactcctttacttggcctggtgacctgagcaagcagctgactctcggagaatgctggggcgtcttccttgaggcagccagacttagtcctgtgtagtcagcaagagcttctccctcccaaccctgtgaccaactgaggccgtttcttacccttcattctgagtttggagcctggcttgcaaagcccttagttgtcagatatgtgggggccagagtcaacaagctgtgctatgcgggctcgagcgcctttcccctttcctgagagatcagaagcctctgctgtctttgcctccttccagaactagcgctgaacacagccctgtttgccaagagtctagccatgcttgggagctccgaggacaacacagcactttctcgagcgctctcccaactggctgaggtggaagaaaagattgagcagctccaccaggaacaggccaacaatgacttcttcctccttgctgaactcctgagtgactatattcgcctcctggccattgtccgagtaagccttccttcccccagctgtcttctgctcttcacttcctaagaaaaggaccctgtagacccagcaacccacttacactagctagttacctctagttattctgaggctcacagcagcccactcttggatttccaagttggctcattattgttgaggacagacagtattctctgtgcacctttctccaagcaaggcttattacagactgctgcttggcccctggagcagtgactctgcagtcctttggtctttgccctgataagagctcttgctggcttccacttgtctttccagtgtgagtagtcaggtaatgacacagaactggcttggtgttgcatggaggagtgtgctgagagagctttcaccagggccctccctccttgtgctgtgctaaccacactggtagcaacactgcacgctgcccctcaggtcacatacctcgggtctcctggtgaccagggtggtctgtttccaagctctcttaccagttaaagaagctttactgggcagtattattagctcttgcatggcctccatgataaagggagaaaccaagaggaacctggcacttgcactgtaaggacctgattctgcacggtatcaggatgcatgagcctccccctactcctcatccccagcgcatctcccactgtggagcttctgtgctgtgt

SEQ ID NO: 35048 - DNA, 1215 bp, Mus musculus
tcatctccgttatcattactacatagtgaacacagataaagttctctcgctgtaatttgggtggtggtcgatagaaatcctccccatggagagaagctgcactaaactaagtttctaggagataagaaaactaagccttccctgtccgtaggcatgcctatcaacattggtcttccaaaataacccctttcaccgcaaaggaaatccacttccggcctggtcagaaagtaagaaaaatttgtttggaagtggcttcctctgagaaatagctgtagagtctccgttctagaatatcttccagtagtagtaaccttgatctcctttcccctacctctttaggattcatctttagttcttcctaggaactgagtggggcatttggtgacgtataacagtccgttacacgatcctctggctaagactacaagccccatatacatttcgccgccgctccgctaacgccccttagacatcccagcatgcaatgcgcctaacgggccgtaaggatttttctgtgccttctaaatcgagcagagcatcttgggacatgtagtctttacagctaatttccctaggtccttcgcgttgcagttttgagtcccgcctattctctgctcccctaaacctttacacatgtcttggtttatttgaagaccaggaagttctctctcgaggtcggctgcggaaagacggtggctcggttgggacagtcgccagggatggcggaacgtgaggatggagcgagtgtctgggctgctttcctggacgctgagcagggtcctatggctctcaggcttttctgagcacggagctgcctggcagccccggatcatggaagagaaagcgctagaagtttatggtaatttacccagggcactatttgacggtgtttgagaggcggcattggagagggggtggaggagggcctcacccttgggctggagtggacccttggggtttttaccagacttagagggaagcatgttcttccgggtcctaagtcacacagcaatgtcgggctatttctaaacctggagcgaaattgagccaggaactcataaacgctttgttaccctggactgcctacagctctagggacagtgtcaagggatgtgggcagaatgagcctacagtgatcaagaagcaaagcatgccgaagatttcactactcaagagtctttccttctttagttcctggacttgcgttcctcccgc

SEQ ID NO: 35049 - DNA, 1471 bp, Mus musculus
cgcgagagagtatttttctcttgagacggctttcaggaccttagtcattgcattaggatggattagttaaaagcacttgctgttcttcccaaggactggggttcagtgtccaggacccacatcaggcagctcacaatcactcagagcttcagccccaggggatccagtgccctattctggcctccatatacacttgtgagcagtgcatgtgtgtgtgtgtgtgtgtgtgtgtgtgtgtatgcccaagggaaaaaaatcttaataaactgtatgatgagttagctgtaagttctcaaggagttaaatgctttgctttagcaggctggaaaaatgctgctgactgacctctctgtcagcacagttctgttaacttttgtccttgtgttttgcagtcaacaagcagataaatgacaaagagcgagtggcagctgcaatggagaaccccaaccttcgggaaatcgtggaacagtgcgtcctcgagccggactgacccctccctaagagccagtggcttagaagtgttggatctgctagtttcaatcctttgtaagatgtagaggacacatgttgactagataggtgatttgtacctcagagctttttttgttttttgttttttcgagacaaggtttctctgtgtggccctggctgtcctggaacttgttctgttgaccaggctggccttgaactcagagatccacctggctctgtctcccaaatgctgggattaaaggtgtacaccaccactgcctggccttcagagcatcttttaagaggattctttctgagcaaatttcagttatgaggtagattctaattgttcaatgagtaacattctcaggatttctaactcaagtgatcagacagaaaatattttctagttattatgtgtaaaatgttactatttttctgatgaccattctgatacaactgcttttcatgtcaaatatctactgtgcccaaatgtatttgatttaaaccattctaaaataaatatgacacgattcttttaatggctcaccttaggtttttactgaattataaattctaatgtaaacgtgaacttttaacaggcatctccatagctgtgttctctgattattgtgtagagtgaggtctaagaatggaaaggtgaggcctgctttccctttgggagaatgctggacccatgcatttagagttgagggtcagatgacttatctagttttaactagtttattttatgtgtatgattgttttgcctgcatgtatatatgtgtaccacatgcttgcctgaggagttcagaagaagggatcaaatcccctggaactagaattacagttgttagttgccatgtaggtgctgggatcgaacctaggtcgtttggaagagcagtgtaggtgggtgctcttagccactcaacaaccatccatctctccagcttcatagtcacagttttaaaggagtctcctcaagaagagcggaggatct

SEQ ID NO: 35050 - DNA, 1188 bp, Mus musculus
ccaaccacttccccatagactgagctcaggggacccagtgtcccacaaactacctttccaagaggccttgattattgactggcacaaatggtaccagatggcattttcactgctataactgggcccctcctggtacctgtttccccagggatactccaaggaggaggccccaaggcagctagtttggtcccatttcaagtccccttcctattcctgcatggcagaggcctctggatggagctgagggcttcctttgacatcaccccactttcccagcttatcggccccttgcttgcctctctgagcgtggggtgctcagtgtggcttcattcatgtcatctgatgatgccctgccctgggcctctttttctcctccccagaggaactgcgagagtgacacagaggagaacatcgccaggaggaaagcccttcacccccggaggaggagcagtacctcctaactggcccagcttgcagtggctgccagggaggtccaagttcctgccgccctgctgtgcaagctcccggaccctgcttgacatcaggatccagacattctgtgttcctgagcactttgcaagagagaggagtctgcaggactcagaactttccggagaccctgggagttgtggctgtctcccggtggggaacctccagcattcctctggcttgtagttctccagaaaactggctttcatctgtctgctaacctcagaagctggaattgggtgtggactaaggaaatggatctcaaggagtatcttttttttttttaaccacaggttaaaggtcagatttaggcagctttcctcacagagcctaccctgtcaagctcgtgagtaaagactctctagagggagggaccaatcctgtgacttaacagaatccataaggagtcaggctgtttaacgtcagactgtgtctgccagcctcttgccagcccactgtgttgtaggttttttctcatttttattattaaatttcttgtttatctaatgcttgggtgttttagagctgtctccctctggttccctatagcccgagaccccgtggcttggggaacactagggttggctgctaagtggacagaacctcaggtgatctgagcagtcttctcttactgataagatgtggcccttgtgtgtcctcccttgaaagtgtccccctctggcaccccatcacaaaagg

SEQ ID NO: 35051 - DNA, 1150 bp, Mus musculus
catattcatttatgtcttttgcatctccataacccataccaagattcaaattccatgagatcagagtcatggttcaaaactgtatccacagtacctgaaacagtatttgtgcatttgtcaagtagttgtttcaaatgtccgtgaaattcagatgttggggaacaaaagctattaatattacctcagacctgttttctgagtccttttaaatgtcattgtatcattttattttcagattgggacagtgcaactttaagcaatgagtcactcttggacactgtgtctagatttgttcttgcagcactcctcaaacacacaaacttacttagtcaagcatgtggagaaagccggcaagtaacttaaaaactatcctcagacaaatatttgctctcatgatgttagaaactaggtaacttttctattttggttctttatttagataccaacctggtaaaagcttatcagaagtgtatcgttgtgtatacaaagttcgaagtcgtttacttgcttgcaagaaccttgaacttattcaaaccaggtcatcatcacgagacagatgggtaaagttggaaatcaattaatttctatgttttcctgcaagcttgtcagaggtggccccacaatttatgaaaaacatgctacgattggtgtgaatgttcaaaacatgctagcatgttttctagtggaaagtattggaagaataaaagcactggggtttatttacctcatttttatcaaatgcaatagggctgctaggtaatagcctgcatagatgatagttacaaactggcttgttcataccatgggtaatattctccttttttaaaattgattaagttacattggaattaccctgtttaacttacaatgccagaaattatcagggatatttccagatacttcagattgattaaaaaaaaatgcagcaatcatacaagaactgaaaattattaaaaattctcagtgtagtaaaaggtgagaaaaggccaaggttataaacaatgcagcagctctgtagtgtgctctgaaagtgaaggttgaggccactgattgaggatgatccaggagtaaatatgggaacaaataggtgattttgaaaggacttggtgattcagacagcacaaccctgtaattatagaaataagcctgt

SEQ ID NO: 35052 - DNA, 1173 bp, Mus musculus
tttggtgttgctcctgagtaatgatgtgttgtgatacttcagagcctttttgattaagatcttacagagcagcttctgcctttattttcttgtggtagcgtgttgccaaagcactgacatggacaccgataaatcaacaaggctttctctttagttttttacattgcttttaacttttgtttatttttgttctttttttttttaaccaaagtattttgaccagattcacttaatgcatgcatgtgttcaaacatgagtatccatttctcaccacttggtatgatagtagcgctcagccttcatctagtttgagaatgtgttcccttctctacttgattgctgttgatgtgtgattttttttttaacccctattttcatgtaggtcctatgcatagtcaattagaatctctgagtgactcttggactcgcctgaaacataccagagattggttctacaactcctcttactcctttgagtctgattttgaccttaccaagtctttgggagttcacacattgattgaaaatgttgtaagttttgtgagtggagatgtggggaatgctccaggtttcaaggagccggaagaaagtatgtctacaagtccccaggcctccatcattgcaatggagcagcaacagctaagggcagaggtaagttgtggatatttattattcataagcaactctggaaaccaaaagtgaatcactcactgaatgtataattctatgaaaagctttgcccttcttttcccctcccctcccctcccctcccctccactccactccgtgcatgtgcatgtgtggtacagtgtgtgtagatgggtggagtctagaggttagtttgcgtgtcctcctttatagtacgtgtgccacagagttctgaggacatcttgtaggagtcatttctcaccttctaccatgtgggttctagtgatcgaactctgtccttcaatctcggcagcaaatacctctatctagtgaaccttgttgttactagtttttgaggcgacctcaaaaccttctgagcttgggttctgcatagactgtgcctcgcttgcctccagcactgaggtcacagagatgctggcaggcttagctttatgtgggtactgggaatccaaattcaggtctttgtgcttgtgcagtaagtgttctaccttctgggctgtctcc

SEQ ID NO: 35053 - DNA, 1687 bp, Mus musculus
atcagttgaagactgcaaagtaaaatttctaatgagacagtttcctatgaaggaggttataaagatctactacatattcaacaaactagattattacctaaatttcccaagtagcttacatgaaacaacatctgccttacctcctattttgtaagtaaagtacatattctcttgcttagtgtatctgtggttgctttggtactatcctggcagggttgagtgatagcaacagaacccacatgcctccaaagctctaagatattcagatttattatgggatgtttgttcaccctgctttgcagtgcatagtagtaaatattctcatttgaaagctcaggtgcatttcattattgttgtatttagcatcacatgtctagttcctcataataccatttttttcattctgtaatgatgtcagtttgtataaattattctcaacattgtgttcatgatgtgttttgttttgtctacattattttctgtaccttcctcccgtctttccctcacttgctttttcctgtgtcattctgatctttattaaagcttcccaactttttggtcgcctagtgatactccattatataacctggaaccctgtgaaccactgctgtttgatgtggcgcgattccgaggcctgacagcttctgtgctgctggacctaacatatctgacaggcattcatgaagatgtggggaaacagagcatcaagcgacatgaaaagaaacaccgtcatgagtctgaggaaaagggggacattgagcagaaacctgagagtgaatccattttagatgtgcgaacagggttaatgtctgatgatgtcaaaagtcagggtaccacaagctccaaatcagaaaatgaaatagcttcattttctttagaaccaacactgccaggtgtggaatcccaacatcaaataacagaaggaaagagaaaaaatcatgaacacatatccaaaacccatgacatagctcagtcagaaatcagagcagtccagctttcctatctctacctcggtgctatgaagtcacttagtgctcttcttggctgtagtaaatatgctgagctcttgctgatcccaaaagttctcgctgaaaatggccacaactcagactgtgcaagttctccagttgttcacgaggatgtggagatgcgtgctgctctacagttcctgatgcggcacatggtgaagcgagcagtcatgcggtcacccataaagcgagcattggggttagctgatctggaacgggctcaagctatgatttacaaactggtggtccatgggcttttggaagaccagtttgggggcaaaattaagcaaggtatgttatctgatgaaattatactcataactgtcaaaagtaatataattctatagtgatttgttaaaaatatggttctttttggtcaaagaaatttgcacattgtttttcctttgtaagaggaatggttattttttgttacttgtacctgggtaatcattgtctgtaattttctatttaaatctacataaacattagaatttgttaacttttggaaactgaaattaaaataggtctggtagtgcacacttttaattccagcactaaagaggcagaggcagggagatctctgtgggcttaaggtcagcttgatctacatagtgagttccgggactgctaaagttaaatagtgagaacttagaaaaaag

SEQ ID NO: 35054 - DNA, 2326 bp, Mus musculus
ttaattagatattttcttcatttacatttcaaatgctatccccaaagccccctataccatccccctgccctgctccccaacccacccactcctgcttcctggccctggcattcccctgtactggggcatatgatcttcgcaagaccaagggcctctccttccactgatgcctgactaggccatcctctgctacatatataactagagatatatctctggggggtactggttagttcatattgttgttcctcatataggcttgcagacccctttagctccttgggtattttctctagctccttcattaggggccctgtgttccatccaatagatgactgtgagtatccacttatgtatttgccaggcactggcatagcctcacaagagacagctatatcagggtcctgcatgattgtcattctaaggcaagaagttaatggtttcttacagaacacaaacttcagggtgccatctataacacttcctcttgctattcttccagaccgattgataggcttgcctgagggacgtgctcgtaatcataatcgaccccaacaaatccctgtcctggctggagtggtcattgaagatgtggctgttggagctgaacacacacttgctttggcatcaactggagatgtttatgcctggggtagcaattcagaagggcaggtaaatggcatatttgctgctcttgcatactctagaaatctgacggtgttgtttatttgtaagagtgtctttgtattttaaaatattagtgttcagagaatcctttgcttgtgcaagaaatcttgtcatcccctgtagtcacaggagtaagggcaggaatgaaaatgaagagaatgtaaaaagacttcaggtctgtgtccttagtccttctgtctatctgtatatggaagagagacgttggtaggagatgtctgagagactgatgcttctacagtggttttcagcccacaagcagagccatcctcacttcctcccataatctcagatcagagaccctcttattcaaagttgttttagtgagcatttacattctcctcatacctgcattagcagatcaggaagttgtggttgcagtaatcttgatgaaaggagaaccaatggtgaggagcctttggggaattccctggttaggttttgacaaaatcttccttgatgttgaacacttaactgctgctgctaagagcagagaattggagccatgtatattttatatctgtgtacccagaaaccagtgtgtcttaagtaagagttctggagagccttcttttttcacttaacaagaactcctaccctttccaagatacctcttccaagaattcaagagtgtgaccagttgttaagactaatgcttttaggggacagtctaaacttataaggactactactgtgatagagaaatcagaatttattcattcgtttgtttgtttgtttgtttgtttttgtttttccagacagggtttctctgtgtagccctggctgtcctggaactcactctgtagaccaggctggcctggaactcagaaatccacctgcctctgccacccaagtgctgggattaaaggcatgcgccaccacacccggctgaatttattcgttattgaagttgatgcatgactcagatgttaatagatttcattggcctgccttctgcttcttcaatctctgtgcatttgcttttttattcttagcttggcctaggccacaccaaccacgttcgagaaccaaccctggtaacagttctgcaagggaaaaacatccgccagatttcagcgggccgttgccacagtgctgcatggacagccccaccagtcccaccaagagcaccaggtgagacggaccatttgtgctcttccagctgctcttctactttcagtcgtgtcgtgatgctctatctgcttgcagttctcactgcatccaacatgtctaaaatgcatcaaggcttggagtattctttttgctacaagcaccataaatatttcatatcatgcatttcttctgcagacttcagtatatagccaaacttcatgccctctctttctctcagtcctcaaagaaatcagcatgttttttaggcaaacaagaattaattaaattagagcttctactaagtatacatacacttatataggtaagtataaatatacctgtatcgataaaaaggtagcaaatagaactggccatcctgatccaactttaatcccagcacttggaaggcagaggcaaagggatctatgtgaattccagcccagcctcatctacatagaaagttgtaggtcagctagggctggtaggaaaaccctttctcaaaacacac

SEQ ID NO: 35055 - DNA, 1228 bp, Mus musculus
ctattttactctatagtcttttttttttttttttttttttttaactttttgccttttctttacagggttggttctggacattacacagcatatgcagttcacgaaggccgctggttccatttcaatgacagcactgtgacagtgactgatgaggagaccgttgggaaggcaaaggcctacattctgttttatgtggagcgtcaggccagagctggagcagaaaaactgtaatacctcctgaccatgagtcatcaactacaccggacaacatttccattttccataaatacttgatccaagagtcaaatttcagtatgcacttttcaatttccagtttggggtttagtttggtcagtggtagtgacttacccaacatgagcaccaactaatttttgttgttgttctaccagaaaacctcagcaggcattttgattggctgctttagttgtaataattcaatttttatatgtagtttccagaacttagttctgtttgactttttatattaatgttttcagttctcaccgaggcacatttgcatttgctctatactcacatgctgagagccaccctgactgctgtcttcatagcagccaggtcagcgactccatcgtgaggatcgtgtgtgcaggtctgtggcccaccggtttcacagtgactgctcaggaattccttccgactgcagaccaggccgtcaccactgctgtgtctcagggttgctgtgcctcagcattaaataactctgccagtcccgttgcacctgtgctagagttccagaactgctccatttcttgtctctggtcttcttttaatattttcttgggggcagacaggctaggaacactgacaagtgcaaatacgtgtttaaaagccctgcgattcagctgcatggtagaggtatgtcctgtgggtggatctgtctgaccatcagaggtgaggtcttaccccccagacctgacttccaggcagaagtggagtcatagaagctctgggttttaattcactccctgcctgaagcagaaccaggtgaaagtatatgtctctgaacaagaatagtttttattaaattcagtagcttaaaaaatactgttcacagaaataggttagaagcactatttggaccatttaaagaaggcagctagtggcaaatgctggaggccagtgattcggtttgcaggtattgaaacctttaagtcagagtgtacaactccaacacagcctgttccac

SEQ ID NO: 35056 - DNA, 1143 bp, Mus musculus
tagaagtacttaaaaatatgaactgaagagttagatgcctctcctagctttgaaagatgaggctgataatgcagtaaggggtatgtggttcctccggatgtcactgagtgcttcatatctaaatgtcaaaggtcatatgtcactggaaaggccaggacagttttgaggagaaggaaaaaaaaaaaacaacaaaactggggggagaggaatgtttctgacaaataggaagcaacaaataattctctgggctttgggaaagtaagttgaaattttctagactcctaaagttgattctttgtaatcaagggtaagacatttaacagactttcagagaactatgattaggcaaattaaacagataatagagagcagcatgattttgatttgggtatttcttatgtaattctagtagctgtggccaaaaatactgatttttcagtaacttgagactatttgtctacagggaactcttaaatgaatattttttcaatttagtttcaaaaaatggtgtatcagcagatctgagagaaacattctactgtttttacaacaccatcctactttgttttaaaatttttgagattgttattgggatctgtggcatacatggtaagctagctccttgtgtaacagttaaaatagttaaaattgtgcaaagttaaaaaatctaaaactgagagaaatatttatttttatgtaagatagctttatactgttaacctttgactagtgtgtttgggtattaggtgaaacattgctgatgttaatgttattcatcaacaattacacctttatcactgatctttatagggatttaattttatttcttttattaaaatttcaagttactatattgggctttaccatgacatctccttacacaagtggcattatcctttgttcttagccacacatgaacaatttaaatatagaggacatttggaaactacagtattatagctgaagctcttggtctgtactatataaagatgatcagtttccaagccctgaggtggttatgctatgtattatcagtgttgtaaaggcactcttcatgctgtgtgctaaagcgacaggagatgaaggtgggtgctgagcatatgtaggttagtttaccttttcagttaaactgcaagggcttcc

SEQ ID NO: 35057 - DNA, 1145 bp, Mus musculus
aagaactgagacaggaagtatgaaattatcagaaagaaaggacaactataataaactagggcatttttacagtcccatcttttgggttacagacattgaccaagcctcactcaagttttattccttagtggggatgaaagggagacagagaatgagggaagcagagggaacaggaaggcgtacattgtccaggagtcttcctttgtagtcagaactggaaccaagatataatgtggggggaaaagtctatgttatcacttacttggcctcaggaagaggacagttacactttatattccactccattacttgaaaatgaattactccctctgtcttgtagtagatgtgagttctggaataatctaccctgttttgaacccatgggaaacagacaaaagcagactacgggacagctctgcctcctttgcccaaatgtcagttttaccttgtctgatcttcctcctgcccactcattgtcaggactgtctactcctctggctgtggagaggtctaaataatgtttaggtaaaatgtattttcatactatcaaagcagaaagctatctgtgtagaactaagcttggtcctggtatttaagtcctgaaaccaatagcatgtttctaagaatctccctgttcttccccctcagtcccatggtttctgggaatgcttattcccttcttcatgttctttccatagaggtgagaaccctgtggagagcagtcagttccatggctcaaaagaagtctcagccaccagcccctaattgctagctccttgcagttcatagggagttctctgatttagtctcattttgacagcatggaatgtcctcttgaagaacaaggtttatatatttttttccttcttctatccctccctccttctgacttgataaaaatctcttctgctatcagaatgtttcatggtggcagctgtgtgtgcaggatacgtgcatgcacacaaaacctctgacagtcttggagtctgggtggcaccctagccttgggaccaatggcgtcaccacagtaaggacaagcctcaagaagaagcaacacaatttagtttcctgagcttggtccaggattgtcggccaagagctggcataaagcagtccagggcagcaagactgtcctaaagaagtgt

SEQ ID NO: 35058 - DNA, 2163 bp, Mus musculus
tcttcttttttgtttttgtttttttttttaaacaaacaaaaccagaatgctttgcttttgatatctccacccttctcgtgtcttttgtgggttaataactagtctccatgaacttctctttgaaagagcctataaatgttaggtgagtctgaaagtgctctttgaagcagcagcaatcggggagtatatccttgttatatagaaatacattgtccttgctattttcttacatttaactttgctaaattgtatataatttgagctcagaccataggaaagtcactttctgcatggtagaaacaacccaacaaatagtctactttgcttaataatgtacatatgtgcattattttttctacttgtagatgaatttagtgacagagaattgtctgttccctgctgaggctgaagatatctagaagtgtgtgtgtgtgtgtgtgtgtgtgtgtgtgtgtgtgtgtgtgtgtgtgtggtgagagagagagagagagagagagagagagagagagagagagagagagagagagagagagagcgcctttctgtggtcttctggatagggtacatagggatttttgcagcagtattagtggttcagtggctgcactttattattgtgctaatttttgacgattggactcgaaattttcaactagagcctgagggtatcaaacagtgaaatgtactgtaactaagtagcatgtgaatcagttgattgtaaactgttccactgggaacttattctagcctcctgtagttcaggcagatgataacaaagtgatctacctgtgtaccagttgctgccataggcctttttactgttcatgtggacattttatgcagtctttgttataaattttctgaagactatgctctttactttgaaggactatttcttttattatacctcatttagctaactgatattctaataaccagtagaaaacagtgagcccgcctccaggcattcaacacatttaggttgcatgttttgttttgtcttgttttgaactggaggaaaagagaaatactttcgaataaagcatgcatgtcaatacccagtagcatacaaaaatatgactttcctgtccatccattaatgaatttagttgtgcaatataataggttgccctgcagtttatgagtaagaaattgtaactgcatttttcaagctccaaatgctgagatctgtattatggcttataaagtgtcttcctatgagcagtaaaaggacaaattaggcagactttcttttcaagcttgtgacttagattcttttataaatatagttcttaatctttaaagatgagattctaagcctagaattttaaaaccacatttcattatggtggtttactgatctcagattttctacaattcaattttttcagacttaagaacagctaaacaaaaccttcctctagctttttcatcacatccagtggcagagaggagtgtctgcgcatgaaatcccgggattccggaggacatagcaggtcagggtacactgataaaagttatgaatttcctgtccgttagaaagaagctaaacgactgagcatagagatggagagcaacgagcatttgttttaaggattttccggattttactgtgtatcttgaagtgtgtgccatatgccaagaactaacagaactttgtgtctcctctttgtacctttttcattttttaaagtgaacttatggtcgttcattcctgtggccttacggatgggtttgtcttgactgtttgcaactgatgctgcagttcccttaatgcaaaatgccatgaactgtctgaatacagtcaggccccaccatgggaactatggcgtttcttcatagacttctacttgtgtgcttaaacattttcttttgcttcagtggcttactgtgggaagctcctgtggatagtatggacctgccatgtggctagtctgttgaagccagttcattaactgtactgatactgatgttgtgttttttaaaaatgaattttattccaggtgaactttttttttttacaataatgttcatctaaaataaaaactacatgttgaaaaatgattatgactcttaagtggattgtacattttagaatatatatggactttaaaccatattttaattggtctatgttcattttacatgatagcgagtttcata

SEQ ID NO: 35059 - DNA, 1165 bp, Mus musculus
gaaacatatgggagccaggtaaaggatacgttgacttaagtctttaacttaagatgatcattaagatgatgaattttcttttttgcaatgcaaataaaatatatgttgattcttcattctcaaactgctgtctgatgtgtttgctataccatatgtgtctgtttagtacttaacatgtggaaatggaaacagaatttaagagtaaaacactacactgaagctataacttgaaacagatgacatgtctgttacatgctgaaatgttaacggttctggaatactaaatttaatgtttcaccttaaaaaaaacaagtgacttctagaataattattgtttacagaatttacaggaaattctgttaaacttaagttctgttaaaacatcacttaatatataaatgacaagtactttacatgctatcaagaaaaatgaagagctggggctgtgttttcatctgcttttcaagtttttaatgtatggttccccttccttccctttctaggttgctacaagattactacagttttcagccatgcacagactgtggttctttgtgtgggttgttcaactgtgttgtgccagcccacaggaggaaaagccaggctcacagaaggtatggctttttttttttttttttttttttttttttggtttttagagacagggtttctctgtgtagccctggctgtcctggaactcactctgtagaccaggctggcctcgaactcagaaatccgcctgcctctgcctccccagtgctgggattaaaggtgtgcgccaccactgcctggctggtatggcatttttaaacctggtaatgagattttaaatgttttattgtgggctctttaaagagtccccagttcggggttagggagatggctccaaggttaagagcactgactcctctttgaaaggacttgagttcaattccctgtacccacagctcacaactatctctaattctggttcccaggattcagcacatagacatacatgccatacatatgaaataaaaataaatttaaaaacaataaaacttttaaaaatataatgataaaaagaatccccagttcaagtggctaactttatacttatgatactgccattatttttttctaactttagaatacttaaaatcttacagatttattcacctgcatg

SEQ ID NO: 35060 - DNA, 1280 bp, Mus musculus
caccaaacacaccctgcactttacgtcagggtgggttgcaggtgtgggtgcacccggggccttgtgtagatgtgagtgatgtccgaagcatgtgtagtgccactcatctgtgtgtgactggtgtttgcttactaagtgtgcaaaccactaccgggtgtgacgctcagctactcatgactcaattttctaatcccatcacagagaaagtggcccatgccaaagaagaaaaccttagtatgcaccagatgctggatcagactttactggagctaaacaacatgtgaaaccctccttagctgcggccacattctctccccctccccccatgtttaattttgtctttaaacacatgcttaccgtgaaaccccttcaatgcgtttttttttatatatacttttaccactgtcactgaaacatctgccgagagccagctagggcaggagttggggaaagacgcgcagaaaggcaagcccgagtcagggcacttgttatttaaatgtgccatttcccaggttgccacccttcatagagtttaggcatgcagtttgcttagccagtgtaggaagcctcatgagaacagaaccattaacagccagagtgccaatggtgggatcagcaggaagactgatgttggagacaatcgggtgcggattggtgctaatttaaacaaaagggcctctggggtcttttgttcaatattttacaatttagacttctgtccaacactaatttattttgtcttgagttgtactgcgagagaagaatatggggttttgtatgcccgtgttccttaaagccaagggtttgaaagccacgctggtcttctgagattccaagtccttccccagctgacatgcccgtagccccttccgactcagtggggcgagcgctcaacacggatcgccccccccttcccagttctccatatcagggtagaagatctaggcactacatatgtaattggtaaagaaaaggcattttcttaagagttataactatgtaaacattgtataatgatatgaaataaaacgcacatttaggacattttctaaatctggtggtcctgtcgtctgtatggttctgttgtcgttattattgttttactttgtgaacttggtgcgattgacccctccttcctgagagtttgctgacggtgctgtcccatggaagctagattcccccggctggcctctcagaaatgattcacgtggtggcagtcaggaagatggccctttccgaaagtcatcttctgtgctacctgcgtagttccatggaataag

SEQ ID NO: 35061 - DNA, 1118 bp, Mus musculus
actgcccagtggaaatgagctgccccagaggaaatttttctctggggctgcacatctgactgtagatgtgatcttgcaggcatcgcactggctcctgccttctgcggtgcagatctctgcagggtgcaggccttgggttatttgtggtgctctctcggcagctccttcctttcagtctaaaatgcctcctcgtgtctcgtcatcctgctatttttaagattgcggattttatatttctctcattccgagaactagcctgggtgctttgtaattatctagactccacctgggaagagctaaccattctggtctcggtaagaggggccgtggtctctctattggtgtgccgagtgagagctgcctgtctttactctagttaaagaggagcatcgcatttgttaataagaatctctagggccagtgcatatcatttctataaccaccccctacacgaagtgtgccaagcgtgtctgctatgtgtgccctgctgcaggtggcccgtaagctggtcatcatcgagagcgacctggaacgtgcagaggagcgggctgagctctcagaagggtaagcgggcccattgctaccacatgtgagggggtgctgcagagcagctgactaaacagcatgaccttctggcagctgcacatttacccacctcgactccaggctccttgtgctctcaatgtgatgtggatgagccgtgagcgtggaacatggaggaaccacgtggggtgtctgtgaatgcgtgtggcactgcatgccttacttgcactgattttgtgaatggccttgtgcatttcctgtgtccactaacagccaagttcgacagctggaagaacagttaagaataatggatcagaccttgaaagcattaatggctgcagaggataaggtactgatagctcacgtatagtttttaggtttaactgcatcccagacagctttgagcttccaatgcctactggtcggtttggtgtaatgactgtacctccactacaccctctgctacttatatcttgcttcaagtgctttctcttgggcctttatgttctttgtttttccccttcatcgatactccgaggggtggccagtaagaagccaaaccatcacacccagga

SEQ ID NO: 35062 - DNA, 1339 bp, Mus musculus
gagtgtaactctttttgtttgttttgtttttcccagacagggtttctctgtatagccctggctgtcctggaactcactctgtagaccaggctggcctcgaactcagaaatctgcctgcctctgcctcccaagcgctgggattaaaggtgtgcgccacttcacgcctttgctgggtactatgcaaaactattaagccaaaccccaaagttcatgatcaagacggtgatctcacacagtaggacaagaggctctcctgcagctggctcaccctcttcctgtaggatatgcttccaggcagctagcccctcacccctcctcctacctgtcccctgccacattggacattccaggggcaggacagataccaagtgtctgtccctaccccagggtggtttaaaactttcacagaagtggacacaggagaagacctctaacaaatgaaggcaaggggccatgaggggagtttcaggacagtgggacagtgtcctcctgtctggggtgatgtgcactaggaacttgggaagaggtcgttctcaggtctctcctccatggtcgtgggcctacttcgcacctgtcccttgctagcccatgctgtgtccatgtatgtgaatgtcctcgtggctggctgatctctcctcatttcataaaccagcggaaatgctgggctacaggcattacttaatgctgctgcttgtgtccccagaggcactgaggggtcttctggctcctaagggagaaagaatgcagatgtagtgaattgcagtttggagtagtttcaaggcccatggcccaaggcctggaacatggaattcatctgtgagggggactgggaatgcagcagagtgcactcctacctctggtcccgtgagggaggccaacattgggtgttgaatccttacactgatcttcctgtcctgtgtttccctgtttgatggttaaaagtaggatgtgcctgatggctgggaaattgcatttggtttacttctgcctttcagaggtcttttggttttcaggatgcaaaagccatgtttggtcagacagccctgggtagcccttccactggccagtttgggaggtggtcttgaaggtcatcataagctgatacttaggacctaggcagtcctccagttggcgttggtgatttccagaggcagctgccctggcttcagtttgtgcacgggctttcagggctaagccaccacagatctgctggcgcacactcttcgtccagaaaaccctctaagcctcttagcacacacatctgcttgttgtctgagttctcttccggctggtgagagtagggacagctgaaaccaagtgttaaaaaccgtgtaacgag

SEQ ID NO: 35063 - DNA, 1305 bp, Mus musculus
gtcctctgacctccacatgtgtgctaaggcacatacacataccctcaacatacataaatacatgttttgttttttaaaaaagaacgctcatctgcgtccatcaccagaggggctgtggaagacaggccttcacaaaagctttagctccgttccgctcttgtctcctttcagatcattgcagcccaggaggaaatgctgaagaaagaacgagagctggaggaagccaggaagaagctggcccagatccgccagcagcagtacaaattcctccccacagagctgagggaagatgagggctaagacaccccccatgctggtgagccccaggaggtggttcctactcccccaacaagaactggacatactggtgtcccccagagccaggaacttcctggaaactgctggccctccaccggagtctgtctctctcagtcctcagtcccgtcactatcagctgcatgatcatggtctcacacggtacagtgtcccacccacagctcttccagctcccctcacgcctcgctatatctcaggacagagggcgcatttcatggactgttaccaaaaaagaaaagtcagtattacgttgttctcagacacctgtactccgtgtcctctaagactgctccagggcctctttgtgaaatcacactcgggaaagaacaatgctaataacggctcacaggaatcatcagtatcatggacatagagattctctctctggagagaagacagctggagttggacactgttaataaagccagaaacactcccaagtgaactctggagtcacagaggtctgtgtaagtgtggggcactgactcacccacgggggagaagatcccctacccgtttgcacgcttttctcgcctcagtgtgtaagctccttgtacaactacacccatcttgtattctgtggcccagaaaaatggaagttatttttttttcccccttccataatccaaagggcagagttgtggaaagtggtcagggttaggtgggtaggggccggaataaaatactgggctcctcactcagcaaagctgtttcagtttatgcagacacacacatggagactatgtccctgatggatctcagtgcagcgccccctggaggaagagtcaggtagcatttaggaaggaggttcccatgttcgagccctattatcagtttctgtgcacttgagagggtccaagttcaagaaggaaagttatttgtttagaactttgacctttgatctcaagggggcatttcccaccatttatcttaataatcctaaaatctaaatgtcccctctggtcattg

SEQ ID NO: 35064 - DNA, 1125 bp, Mus musculus
aagcctgggctcgatgtgactgctgtcaccgtacagtgcagctcaggagtggggtgttgtgtttggtaaatataccaattttataaaatccgatcgctctaaaatatgctcaattctaatggtgtactctgcactcatgaagagggatgtatcaaagagagctgggcacactgtgggatcagtaaatgcctgtagaatgaataacacaactgtcccacagagttcaatctgaggacaatctatctattcctataaggtagcttgggatccagatgagctagaccctcagaaaagataaacatatcagaaaggtattatgctatcccactaagccacaggctcacttaatgaggctgtgggcatttttacagtcattttacaggaaggtaaatcaactaaattccgtacttcactggacaggggttacaaatagaagtggaattttcctagctgagctcccaaagggcacaagagaaattttccacctagggcaggcttcaatggcagggtccctcctagaccttccctctcctggctttgcctctgtagattggattccagattcgcacacgtgtgcaggaccttggccatggctgtatcttcctggtgcaaaaggcaggagccctccaggtgtgccccacagacagctacaccaagagggagctgatcgagtgtgcccgctctgtcactgagaaggtaagggggttccctctgggcaagatggatataaccattgtgccagctctggtggggacaaaaccaaaatttcttcagctaaaacagctgtctccctcaccaccttggcccttctcagcgaggatggtattccagagtctattgtgatccacaggacttgagaagtccaggaaaaagcaggcagcctgggaaaaaacagggggcccccttgcaggtggccctacaacatcaggagccaaccaggggaaggcagatgccacagcccaccctgtaacagtcagtctcctctcctaaagagtttctaagtgctgctgtgagctgggaccaaaacactaaaagagcgagatagaacaatgcagactgaaatccctacccagcatagggaaggctgaagccaggctgggctatatagtgagaccctgactccaa

SEQ ID NO: 35065 - DNA, 1235 bp, Mus musculus
taatgtagatgtgaggggaattacaaactgggatctgaagagttcagagcagggagagaaagtcgtacactgagcatggccaacagatttgacccagccatgagaggaagtgggggtggggaggaagagaggaagatgagagtgagggcaaaggatgcagagagggaaggaagaaagagagaggggaagagaaagagagacctgtagagcacatgactgaagtggcagggttatatggtatggggagggcggggttgtgagctggagaagttcagggtaaggggagggataaaaagagctaagaagagccacaggtacttgttattctgagagcctataagccagcatggctttgtatgtaataggcatcgcagatagcatttgtttcttttggacctgccatcttttagttgagtgactcagaagcacagccctgggcagtcactgttccttccacagtccccctcgccgccccttacacgaggtaaaacttcccatggcattgccttttgtcctcctagctacctccaagcacaaagcccttccaggaggcccagagtgagctgaaccaggctgctgctgatctgaaccaatctgctggggaagtcgtccatgccacaaggggccagagtggagagctggcagccgcttctggaaaattcagtgatgactttgacgagttcctggatgccggcattgagatggctggccaggcacaggtgggtgggaaggtggtttgtgctgctcacttgagtctccctgttctggtagaccacccagctgggggcatctgggtggatggggaacaggatcctgtaaaacaacctgcagcgccttccttgactgccttggaaattctgtgacctcacaggcttggtatgcccggtgatgatggtgactttttcccacgatccaccaccaaagcctatatcctttaccggagttgggggatggggggttgggagcgaggagaatttttatcagaactgaggtcagttaatgcatgaacacgtacacacacatgcatgtgtatttgtggtttagtgaactcaacttgaatgaattacatctgggacctccgaatgattaaaaatgacctcattcagatggagagatgagctacttgtttatagctagggaacatgactggtctggcatcagattgcaggactggttttttggtagtttggtgaggtttttttgtttgtttgttttttggttttttttttgttgtt

SEQ ID NO: 35066 - DNA, 1197 bp, Mus musculus
aggactggcattcccctccaccacacaccccaaactgctccccaaactcccctgataggatttggagcatccagaggcatccttagccatcctcctactggtcctcgagtccacaggtaactgacaggctttccctagtctttgaggaaacacaggcagcatttctaatgactccggaaaacatgtgcaattcttttagatagtcagttgtcttacctcagcctagaagattcacttatggtatcctaagaggaaaagaatataattagtagctctcggaactttgtctttattgaagtaccgggcaatgagaactgccatgcatgacgaattagcaggatttctcaaatcacaaagaaagtttaagagtgtagaggttatcccattggatgagttgggtccctggtatgtgtgctaagtgaggcacagagggacctgagggagatgtcagacaccctggggtaccaggagcatccactgcagtaagcctatccgtgtctttctaggtggtgagccccaccatcagctctcccgtgtgccaggagcagctgatcgaagctgggaagctggtggaccgctctgtggaaaactgtgtccgagcctgccaggcggccaccagtgatagcgagctcctgaagcaggtcagcgcggcggccagtgtggtcagccaggccctgcacgacctcctgcagcatgtgcggcagttcgccagccgaggcgagcccattggccgctatgaccaggccaccgacaccatcatgtgtgtcactgagagcatcttcagttccatgggcgatgctggtgaggcactggcttgggagaggagggattggatggtttgggtgttccccatgatcacggtcactttctaggtgatctctggagtaaggagcaagaacaatagtgcatcttccttaatctaaaacttcctcaccgtggcacagagaagatccggaagtcccaacattctcttccagggacacaattaaaaacgtcatcagaatttcattatttgaattcacaattttaatgagccccttttgtcccatatacagggcatagttggtaaagtcagagcagtcaccaaaggaagcaggaccaaagcttggcatgaagacatttatttaaaggtccactaggaatctcctccaaggtcactgtagagaaccaggagggacagcagacagtagatgggac

SEQ ID NO: 35067 - DNA, 1144 bp, Mus musculus
tgggagagccaactatggcccaatgaagtcaacatcagttcacttacactcctgttatggagtgggctggctggatactggtctctggaaaagattcattttgttctatgggtctagaggtgttctcctctgttagactagtttcttggagaacttaaagttattttatttccaaactgggataaactattttaaacccacatcatccctagctgaaactgctggctcaaaagactcttcttccagaccgtatcctcagtgatctttatttcttttgaggagttgggaagtattctctgtgggtgagcggttgtgtaggggttgcagatgccagccctggtttcaggagagttatgtagttagtatgtgtatcttgaagctatgaatcttggagtagttccctggacatgagcatgtatgggagtaatgtagtgtgccacatagtaagccatagtttaaaatttcagtgttcagtgtctccatggtgtacatgtgtgttatgtacatgatagtacaactgctcacagctctgaagatcagtgtgcctgataatgtttatataactatgaacttggaccaagtagcagttggcctcaacattttgtatcatgacttttttggataggggttaaatatatggattctgggatcaggaatggggagggggagaggagggagggaggtccttataagcaattctcaggggttgcttatgatctacattttaagaaggttgaattagaatcaggaaaagttggtgtggctataatcctttataacattctccccaacgtgatctgcttggactcagctttagtaggaaaacttctaatccaggtgtttagactctaagggcagctatatagataacggaagatctgtgtgagagacagatcaacagatgtgcaaatgacaagctgttgatctgagtatagtggtattcatcatttgcccctcaccagttactgtaggtgtatccctatggctatgtaataataataatagtaatagtaataataatagtaataatcatcattatcatcgttattattttaaagatgccaggaggatatgtgaatcacaatcacactagtgtttaatgtctctatgcatgttcatagagattagtgactgcatcatagtc

SEQ ID NO: 35068 - DNA, 1172 bp, Mus musculus
tgttttccatggagctatggggagcccttgacagtcaggcatagatgaggcttcctggagctgtgttgatgctatttcccaaacaagctacagccttcagcattcaggttctgtttttagatagccttatggacagaggtattgaacccagatacaagcgctaaagaggggagccgggtctccccataactaggtaagctgtcaccttgaggataaatagtggttttagaaagaagaccacagcttatcatgtctcccacctcacagtctgctctgaggctgggacccaggagacagcctgacccaggagccagacacccttccttttaacttttcattctatcatcttcatcaaataatttctaaggctgttgcagccctttagacccctgtgtttgtgtgctcacttggcagggatggattctataaaatgtgaccatttgatagagcctgcggagacccagaggacaagtgcttggactaggggaccatggccagcctagcttactaggacagagcctaaagttgccgtcatgcctctggcatttggattcctgtttaatcctcttgattggacagacttgctcactgttgcttcaggtgtactcatgggcacactgcgcttccagcttttagaagaggtattgcctcatgcctttgcccctacatggtctttgcacctaaggccctggcctgatataaaggatcctttattctatcagtcctggttcttgccccagccattcatctgaagcttgagtgacacaggcgagccatctagagccccctctttctctctaggtttacccattcgcagtttctttctttctgtttttaaatctcattatgcatttattttaaagatttatttttttatttgtgtgcgagtatattgcacgtgtgtgtgtgtggggggggggggtgggcggcacacacctgtagagcccaggttagggttgggtgtcttcttccaccccttatgttttctttgctaggctgaagctagacagtctcagtaatcctcctgtctccagccacccacacggagctggggttacaggcttgttccagataataagcctggcttttcacgtgagttctgtgaaccaagccctggcctcatgattgtatagcaagcactcttgtttgttgggatgaccacccaccccgtc

SEQ ID NO: 35069 - DNA, 1099 bp, Mus musculus
actggcaactcccacaacagaagcagaaggtgggcaggagaggtgtggctcaaaggttaagagcactggctgctcttgctgaggctctgctcctagcacccatgtggcagctcataactatctgtaattctgtttctggtagatatgactccattcttctggccattgcaggtaccagatatgcacacatacacatgctggcaaaaaaaaaaaaaaaaaaaaaaaaaaaacaaacaaacaaatcaaatcaaaccaaagccaaaactcatatacatatatgaaaaataaatcaagtacagagccttactttattatttattatttatttatttagaagactcccattcctgtcctccatcctctgtacccagttttgattcctgaacatcctcaacctccatgacccttgcccttgctctcattttgctgagtacccagcccttgattagacccgccctctgctttgctttcactgttctacccccccccccaccccccacagtaatgagcctgggtggcgaagccactgggccatctgcactgctgtgctcttgatgtatgactgaatcccagcgggcctcctgacgccgcagacccactgtgctttagtgtgaggttgctgtcagccggtgacttggtttccctgattcctgcactgaagcagttgactgactactgaggagtccacgtcctccctggagttcatgctctctgcacttctgcagctgtcccttcccctccacatcatcagagtccctcgctgatggattatcttcacaggagatgctctgacatcttcatcttaggcaaaaaaggcatcccttgactttgtgtcttagccattcatctcccatttctttgctttcccttcttagcagacactaggagaaaaactacttttattttatgttctgtgtatgagtgttttatctacatgtatgtctgagcactatttgtgtgccttgtgccttcagaggccagaaggggaactggagttatataggtggttgtgatctaccaagtgggtactggaaactgaacctgggtcctctgtaagagcaaaatgtgcttgctcttaagccatctctccagcccttca

SEQ ID NO: 35070 - DNA, 1206 bp, Mus musculus
agaaagttttctccattgcctctgctgcagtttttgcctctactctgactttccccagtgatagagcctgacctgagaatcataagctaaaataaaggttttcctccccaagtcctttaggtcatagagttttatcacagcaatataaatcctaaaaatgtcaaatgataaaatattttaatacagattttttttgtttgtttgttttttgtttgtttttgttttttcgagacagggtttctctgtatagccctggctgtcctgaagctcactttgtagaccaggctggcctcgaactcagaaatctgcctgcctctgcctcccgagtgttaatacagattttaagcacactgcttaaacgaagagctcaaaaaaagctgcacatacccaagataatgggtgtgaactcagggaaaaaagagttagtttaaaggccattcacaagagagatcttaaacactgggcagggtatgtgttgggcaggtagacttagaaaggtccttagaagtaagagaagtgggcctgcggggatggctcagcagtttagagcacttgctgttcttcctgaggacctgggttcgattctcagcacccacatgatgccttacaatccagatccagggaagttgtcgtctcctgcagacccttttgtgcaccaagaatgcaatgagcatggtgcacagacatacacattgcacatgggaaaacacatatacacagaaaatcaatccctctgagagaaaatgtttgattggtttagggaaagaaggaagcatagccacgtgtgggacttgtccttacaactccttctctcagtgtttgggaaactataaagctattattttcaaagttttgctaggaaatccaaatgaattctcaggggagttttactggacagaaactggtgaccccagtggttgaataagggaaaaactagaagaagctgaggaggagggcagccctgcaggatgaccagcattctcaattagcctggacccctgagatctctcagacactgagccatcaaccatgactactagcccagggatggcaccacccacaatgggcggggccctgcccccttggtcactaatggagaaaatgccttacaaatggatctcatggaggcatttcctcaactgaggctcctaattctgtgataactccaccttgcgtcaagttgacacacaaaaccaggcagttcag

SEQ ID NO: 35071 - DNA, 1117 bp, Mus musculus
ttgtagaagaggcattgtgctgtcatagcttatatttggcagctgtttgttggtgttatgaatatacacatgcatatatagttttaaaaagttatttaaaaagtctgagccaggcggtggtggcacacacctttaatcccagcactcgggaggcagaggcaggaggatttctgagttcgaggccagcctggtctacgaagtgagtttcaggacagccagggctaaacagagaaaccctgtctcgaaaagaaacaaaaacaacaacaacaacaaaaaacaaacaaacaaaaaagtctggatggtatgtagccttttagaaaacgctagtctgcaaacatttttccatgtccctctttgttttgttctgtaatgcaggtatgttccggcctctgcctcctgctggaccttgagttctcacagatttcttccatctgtgttcttagcattgcatccttagtgtttgatagatgtaacatgttataataatggccgtattaatgttacatttcttgtctcccccccctttttttaaacaggtaatgtggctttggataatctgcagataaaagaaaatgctctggtaagggttattattttttaaattatgcttaataactcagctaatttggcaagctcttagaaacgtttggttactagacatctgtaccaggtaccagataaagtgactgagtcactccaagttgggttctttatttaactatttgtcattggaaatcatgagattaaagatctacagttttccatttaatgatcaattttttttttcaaaatgggattcagtccatgacctaatttgactatatagctttgttgtctctgtttctcttatagacatatttttcttcaaaattatctttatgcattttccaggcaaattagcatttggtggtaatcaatgacctaggctaccactggagcagtgcggtgacgttgttagccatagagtcctgagggaatagtaaggtgtaaggggggacttacccatcagctttagtgaggagtttgtatcatttgcctttgagctaaaagccaagcagccaagcagtgctcaccctccacccagtgaggatacattttaacctggtatgcaaaactg

SEQ ID NO: 35072 - DNA, 1196 bp, Mus musculus
ccaaaatttgcagacttttggttttatgacttggcactagctatgtattctctttgtgctttggttttctcctttatataatgtaacctgtatcttgtgtttattgtaggggaatatgtgataaatcatttaaaacactttgttgtgggcctggcccttaggaatgactatgcaagtgatttttttcatctttctctttgtcattggttttagcatatggaagagagcaaaataaagaaatcccttccaaagggacagaaggaattaaacatgaacagcagggatatagagggctttggctaggccgtgatgatcactgggactgtaggtttaacaaggagggcagagaaagcttcactcagaaggattgggcccaaggaggttgagagagacaccagaaagatgtgcaagggcagagctgactcaggaggaaggaatggaccagttgaaggcttttggcctggggagggtggcagccactgtgatttacaggaagtggcagggtggagtggaagtggggctgctgggagtctggcaggtcaccaggctggtgtgggatcttagaagcagctgtggattttggcttgaattggcaagtcgttaatattgaatttgagaaacaggatgttatcattggggatgctttagaacttcttctactttccccttcttcttggtcctacctcagttagcaagcctgggaactgaaaccccacctacctctcttctgcccagctttaggctgtcaccatctttatttaaccaatagttgtacattaaggagcaaggtatgcatggcagtcaagcctttgggggagggggaggtggtatttagcattataatacctagcaaaagaccttacctcaacaggggaggagcttggtttcagtggaggggatggaacgtgccagagtctaggtgtttgaaggcagaacccatattacctgatacagattagagataagagagttaaaaaccttgggttattttggtatcgaccattcagaggctgactctcctgaggatctatcccatatacaatcactaaacccagacactgttgtggatgccaacaagtgcttcctgacaggagcctgatatagctctctcctgagaggctctgccagtgcctgacaaatacagaaatggatgctcactgcgacccattggactgagtgagcatagggtccccaat

SEQ ID NO: 35073 - DNA, 1193 bp, Mus musculus
tgtgcaataattgaactaagagaacacttttggtaagccagtcagttgactgaagaaatgtatctaaaggagaggcagtgcattttctatgttcattttatgaaaatgttatttttcttctaataggatgagttttacacgagtgctttttcttctcctttctatctagtctcagaccatgggcggtctggcagctttggtgggcagccctgcaccgctgtctgtagcgaggcacccaccggctgtcagagcatgagcacaacgacggattcttgagaaatagaaactgagaaattgcactatgagctcctcagcattcaggaatatataaaatacaatatttttttatatttccagagatctattttagaatataaaagactacaaagggcgccataaatgaacatttaattctaatgcatacctgtaaatgtcttttaaatacctgttaggaagaatgaaaaatccctacttactttattgtataggttttcttcaaggtctgtacagagttgggaaacgggtgttccctgtatgcatcaagctgctgtccttcctcgtctccctgaggcttgttaggtcggggctgcctgttggcaggttaggtagaggggcacgggctgcctgttactctgagggattttatttctttgggtggacctttatttagcctttttcagggtgttgaacatggcattgagttaaagcgcacagtcagcgatgagatgaggaaggtatggatgctcatcttgctttgcctttgttgatgcaggtcctccttccaccctcaatgccagtcacgctttcaagattgcacaggaagacttcttagcttcccactgctgcttcatgtttctctaagggagagtgcagaaatcagtatctgatttttagtagttgttagatttttaattcaattccttcatttcttatcctcaccatgccccccatctccaatctccagttccttcctccctccctcccttccttccttccttccttccttccttccttccttccttccttccttcctctctctttctctctctctttctctctctctatctttttctcttcccctccctccctccctcccctcctgtccttccttccttccttccttccttccttccttccttccttccttccttccttccttcctctctctttctctctttctctctctctctctc

SEQ ID NO: 35074 - DNA, 1131 bp, Mus musculus
tctctctctctctctctctttctccctccctccctccctccctctctccctccctctctccctccctcccttccttccttccttccttctttccttccttccttcttccctccctccttccctccctctctgtctcttcctttctttctttccttccttccttctctctttccttcctttcttccttccctctttccatccttttgataggatctcacaatgtagaacaggctggccttaaactcacagagatctgcctacctctgcctcccaagtgctgggataaaaggcatgcgccactgtgcctagcttaatactgttattcctgttaagaaaatcattacatataaaactgatagctttaaacctaattgaactttctagagctagaaggcagtatgataagcctaggaagtacactagcaatctatgtctttaaaactgacttaatcaggaatttgaatatctgactacatttttcatgttaatcccagctgtcaatggtattataaatatttaaggcattatattgcactgatggtttattccagaaacaaatgtacagaacattagactaagaatagtcaagtctataaactcattgtctcagttgatacctgtggcatttttatttgatacagtgttctggtacaggagtaacccactggttgtatgtaattaggtgtgtggtcttttttacaaatgcattcaggggcagtgacttgcttataactttttgagagaaataaaacattgttacattgtttatatgtgtgagatctctgtgtttgtgctaaataccgaagtctcattctcttctttatttcaacattcccctttgcccatctgctttcatgatagtcagaagacaggtgagacactgcagagagttttacatggtgctggtgagggaaagcctgttctaaggctctgagcctccctcccacactggagctgtgtggtccagctgcagcactctggaagcacaatagcattgcgctgagtcctgcctgtcatgagttctcagtcactgggaagagtgacagggatgcgaaggcaggcgtcctggggagcagaattcactgtggcagtcttgggcatgcattctcttcaatggttttgaagatccgg

SEQ ID NO: 35075 - DNA, 1182 bp, Mus musculus
gtccccttgtattctgcctaattgggctgcattttaattttgtggcaaatggaggttctgttttacatttctgttagactgacaagcccaagactggatctgaattagggagtttgcagtaggaccgattgaagctgtgagcctcttagaattggctcagcatcttagagtcttctcccatgcatcttttagggtcaggcaggagacttcagtagaaggccctgagaggacaagagactgaaatctagaagcaccgaggtaagctgagaataactaaaccatgggttatgcagagtgaggaatattccagaaacttgtaccttcgattcaggcacatctgtttgtgtcactggtgccttgggtgttgaggtaacacaaaatagtaaatgttaaagtcacccaggacaatactgggacacctgggttcccatcacagcttagctctttgttgtaagtggccccagtcggtatcctctccccaagaggctccacctctttctacagtacagagatatgcagaggtctgacttcctgatcgccttgatgttctgagatcctgtgacagacatcccgctgactgacttacagcaccattgagcatcgatgcttcctttcgataattgttggggcacaatttgaaatgacccccctcttgagagtgaagtcatgttttggtaagttttcagggtttcacctctacctcagtatacttggatgttcatatcctgccactacctcagcctacttagacattcatatcatgccaagatggtaccttggcacgtcccttattacctctccacgccccagcctggcctgtgacaaccgttactcttcatttactgtttctagaaatttcactggaattgaattatatacaatgtagtctttggatctggctgatttcactggccatagtatttttaggactcatcggtgccatagaatgtattagtataggttggatatcctattttttttaaaagtcccaaatctaggtttttcaaatttttaaaatattcacgtagactttactggctattcatccttcatccacaagtttcagattttcacattggagatgctgaacttttccctttctctgagtgaccgatagtccatggaatgaatgcaccacattttctaatccctccataactgctgggctcctttttctttgtg

SEQ ID NO: 35076 - DNA, 1211 bp, Mus musculus
tgggagagaatctcgggagactccatccctctctgagaggtttaggtaggtggtggatgctgggaagggacagtcagctcctctctgtacatatgggcaacactaactggactcagtaggttagaaggaggagaaggaggaggaagaggaggaggaggaggaggaggaggaggaggaggaggaggaaaagaagaagaagaagaagaagaggaggaggaggaggaggaggaggaggaggaggaggagaggaggaggagaagaaggaggaggagaagaagaacaacaacaaacaatagcaagacaaagaagatgaaagagagaaagagtatgcagcttagaatggagtgtgagcaaggaattagtttggagataagttgaaaggaaggaatggtatggatatattcatataaacaagaaaaagttttaagagtggataaataaaataaaggtcctgagtcccaccgactgtgaagccctaactcagtggtggtagtggaggtgctgtgtggaaaaaatcttcataaatgtaggaagaaattaaatgaagagtgtgtttaagatgttgctttttcagcacaggctgcgggaagaaaactcactgacccaagcttgattgaccctaggttgtgacgcgctatcgccacctggtggtcacatggccaaattgtaggtctaaacttcagatcctaagagtttaggcagaaaacttcaccagagtcaaaaaatcctagtcaagttgtctgcatcccctgagagttttaaaagtctataaatatctgcataagaactgaatatttcatatttatctgaatgtcttagtgatgtaggcattgctgctttgaggaactcaaaatcattcaaatatagcagatagaaaaaaaaaattatctccaggaatacacagatctctgagtccagctggaagttgagaagactcaacagctttgagccttgtaatgaagggataaaaagactttttaaaagcatccctggcaggttgatgtctaacagacttaactgctaagaagcaagtgagcaatgattcttccaaaagttctcttttcagctgattccgcagcctgactcattggcgttgcaagggctgcttctggaacagagctgtggctgatcctgtgacttacttttgtcactgtgtccaatcggacagaatcaacaactatggcttttttttttttttttttttttttttt

SEQ ID NO: 35077 - DNA, 1101 bp, Mus musculus
agttcaattcccagcaactacatggtggttcacaaccatctgtaatgggatccgatgccttcttctggtgtgtctgaagacagttacggtgtactcacatacataaaatgaatctttttaaaaaatagagagagtgaagagtgtattgttttatttatgtatgtgagtgcatctctgggtgagtgagtaccacatgggtacaggagtctgtagaagccagaagagacccggatctcttggagctagagttacagggagtcgtgatctacctaactgggtgctgggaacctaccatgggtcctcaggaagagcatcaagtgtccttgccagctgagccgtccatttgtggtattcctctacaatgccatctagccatctgtctatctcattctcccattctccagtatagacccctgggtgacaccgggcatcacctacagttaaagatggtgtctgcagctgccaaagcctctgaccgtgctttgagaagcgtgctctccacacaaaggtgcccctttgcccagcgatcccctcacagtgttccctccatttaagacagacactgcctccacagtctgttctagtgttttccttgcttccctgtgctgaattacagccccagtcaacggcccacttgtgtgtaattcaagaagcaattatgggctttttgctttgaacaagcaagggaggggggtagaatgaaagatgatcattaccctactattcctctgctttagccaaacagttcacagagccttgatgccaaaagtcacgggccttgaaacagtggagggttgggggtgggggggaggggcactgccttccacaaccacgcctgcctactagaaggcagggactcatccaccatcaggttgagggacacaagctgactttagaattgtgtttaaatacgattgtaatgtctgcaccatgatccacagcctggtgatgctatcgctgcaaattaaaatgtgcaaacttcagagtcctccgaaggaagctcacagtctcggctgtaagccttttgttttattctgtgggatttactctaatcggaaaatggcagccttatctctctgagcgaggccacatgaatggtgt

SEQ ID NO: 35078 - DNA, 1172 bp, Mus musculus
ggacttaacatcatctaccttctatgtaagtagctctattaagtaggatttgaagtagctcagtcactatgagctactttccctactgaaagtcatggctggaagtcatggctgtgccacaattcacctcgcccagaaaatccctcacaggaatgctctggggcgtctcttgagtgattcttcatctagtcaaactgataattaatattaacctccatgggtaccccatgcacctctcacacttacatataatttccactttaacagtgttgggaggtgggtcctttaacttgtcatgactagattaatattgtcattgcagttatggatttctgacaaaaggagagctcaggtctttctccacttgtcctcttaacctttgctctcagatctggtgcagtaagatttctaccatgggaaagatctagaacgtccattctagacatctgcttccatagcagtgagccaccttagctaaggtttaccaatgaccccttcagtggggttctgtaacagtgcacaaaccaatgatgttgcagttcctttgaagagagtctctcctggacatgatgatggtgcttgcctgtaatcttagcactcaggaagcagcggcaggaggcctctttgtgatcgccctgtattctacaagctaaaggcctgagccaaaagcagtgtggtcatggaagtcttcagaacaccagaggaaatgaggtgtttttggacctccctcaggacctgcactgctcgctcggtcctgatgctttgcatagatcccaccaatgctgcctgagtcagataacgacctttagtgacctctaatgaagctcttgcaaataagcctgtctgttcagactggatttacacaaacactgtttttcatttttgtttttgtttctgttttttttttttctttgacatcagattgttttcttaattgacttcagtgttatcatgtgaccctactgagctcatgtcagttgaaggtgacaaggcactgctttttctttcatgggctttagctattttaattgttactgtgcatgctggtggatggtggtaatatctgtgtgatgtgcatgtggaggccagagcagggcactgctcagtctctactgctctccccttactgccttgaggcaggatctcaccttgaagcggaggcctgcagtttc

SEQ ID NO: 35079 - DNA, 1142 bp, Mus musculus
gcctgtcaatcacgcagtcatgaccatagtgacagttagtggcgttgtgatctccaggcctctagatcgtggccttgatttcttatggactagaagtatcctcttcacaggactctttggagaaccgaatcaaagtaacccaaatggtctccagacacacacagagagtgatggattctctgctttgaggagggagggctgtctccttgtcctcaagaactctggggaggcaagctggaaaatcctgtagtagtttccaggttacccataccctgaagggcacagttgtggagaaagggatccggaggtggcaggagccattgaattataatgcccgccatttttgagcttcttagtccttgtggtaacaacatgctgtaatggaacatctgttgagctgagattaggattaggttcctctctggtccaatcaacattagaaactacccaacactgtttagcaggcattgggtctcaaagaatgaagagctagatagatcatgagtgtatcttggacagtggtcgttgggtagaccatcctcagagtaagagggaatagtatcataggcacagaggtaagaatgaccagtgcagtagagctatgagccactatcagtgatggtttggaatgagtcaggacatcatgtcgcattgggcttagtcttgagttctgtcctaagcatccgatttccccaggtgaccacagcttgcttcccagatgatcctatttgtgagatctctctctctctctctctctctctctctctctctctctctctctctctctctctctctctgtgtgtgtctgtatgtgtctgtgtctgtgtgtgtgtatgtgtgtgtgtgtatgtctgtgtgtgtgtctctgtgtgtgtgtgtgtgtgtgtgtgtgtgtgtgtgtgtagatatgaatgtgcccccagctttcttcctctactctactccatcttaattgttgagactcatccctgagttttcagattcagccagactggtttcccccctccccgccctgaaacgccccagaaacctcctgtctcagttctttcagcactggggctccaagaatgtaccttcacacccctttttttcccatatgtgggctagagaattaacttgattctcatgtctgcacagcgtgc

SEQ ID NO: 35080 - DNA, 1174 bp, Mus musculus
ttttagtctatcattataccttggagaaataaacactttttttcaatacttatagatcttttacattttcttctcatattaatgtaacccatattgctctctttctggctactcttgcctcagcctttccagtgccaagattatacatgtatgccaccacacttggttgtttccttgttgaatctgacttcaagcatctaccttgtctgtggcttccatgtagggagccatagatgtaagatcaaactctcccatgaacatgttatgatgatgtttctggcccagtgcagggcactgtagcagcaagttatgcaaatcatttgtctggtctttgagttcatgtgtccgtcagtccatttagaattcacacatgaatattagcatggcacagcatgggagaagaaatgggactcaggggaggtatagcagagtccagggcaggaataccaaggactctgagaatacacttcctgaaggaaatgggatttgtgtgcaacactgaaggaatgatcacatagaggaagaagaagatgagtaaaacctctgtaaaggggctcttagggatggagactcaagacagatggccttggctgctgtcccagctttgctaattcccaacaatctctgtgatcttgggcaaatcactaccctcttgtcctccagtttccccagtagtaaactgggaaagaacaatagtatctgtctgatagattgctccaaagctgcgtcaaacatgtgctgcaagacacacagctaaaaaagcaacgtcattactgtggtggagagcacaaagaagtcaaagagtagaaccttctagaatgaagaggctgcactgaaagctagaaggcatacagggattccagccattgggcagtcatatgaaactgccagataagactgccgttggtgaagcaggaaagatgggattgttttctaagggtgagatgtgtaaatatagccattctattgctatgttaaaacaccatggccaaagcaacctataaaagaaagcattgaattgggctttcattttcagagggttagagtcaacaatggcagagcaaaggcacggtggcaggaagaactgagggctcttatctagatccacaagtgggaagcagagaggggagatcacactgtgaatggagtgagtcttttagaatagcaaaccctg

SEQ ID NO: 35081 - DNA, 1194 bp, Mus musculus
ccagcctctagttttccagctgggttttaacttaacacctttttagtcgctagcttccaagggaatgtatttatatgcttttttaatctgacttttggatttaaaaaaaaaatggaacccatgggactgtgttggacacatacttataaatccatgaaggcttagcctacagaagccacaggaaatactatgatattttggaaaaggtcaagtttcatagattctgtgaggcgctcagcaggttgtaattatttcttttatttaaaagccctccagatattatattttttccagagggtctgcaattgagggtaattcacatttttttcatactgtacattctttttggctgagtgctggaaatacacaggaaatcaagtggcttcggaggacccagcagaagccaggccgtgaagtcactggagcagaatgggaagtctccaggtctgcaggtcttgaccacctctgcctggctttatttttacaaggaagggaaaaaatgaagcaggtgaacgaacacactgatcggttgtgttctaacagaaaccaaatgtcaccatgtcctcaggcggggctcggcagctggaactgctcaagaggtttagacgcaggacgacaagacagatgtgccgaggcagccaggaaagtgggaaagagttgcctgtgtctccattcaagttcctggtgctgcactggccacagcttttgctggcctggcacagggtgagagcagagctgtccatgccaaggccaaagaaagcatcaggctcccttgtttcccagactctgagctgtctcttaggaaaaatctgtgatgactctttgaagactcttgcctcagagggagagaggaaggaagggatggaggaagggaggaagggagagggagaaggagagggagagagggagagggagagggagagggagagagagagagggagagggaaagggagaggggagggggagggagaaggagagagggagagggaagggggagggagagggagagagagagggagagagaaagggagagggaaagagagaaaacagaataagacttttagtttcagcaacacaaatgaaaaagaaaggaccctatcatgtacccagaagcaaacatctgcccagcctggcctccttttcataggccagcacaggtcctgggagggaccatgtctgcaggattagaactca

SEQ ID NO: 35082 - DNA, 1190 bp, Mus musculus
ggcttttgcttgggtgctggagatagagactcagttcctatgcttgcatagaaatccttttactcaccaagacatttttctacttttaaaaacatgaactatgatgttagggataagggcattaagtaactatgacctgacttttccctaataatgtatcaatatattttcttccaagatgcccactgaagctggtgagtgccgaaaaattgaaactctggaaaatttggatatggacttcgatggtgatgtcacagaacttgaaacctttggagtaactactactagtccacctaggtcaccaagttcagaaagtgactcctctgcacccctcatgacagatgtccacgcagtccccaaaatagcagctgtgcctctggcaccagctacgcctgtggcacccactatgcctgtggcaccagctacacctgtcacacccactatgcccatggcaccagctacacctgaggcatcagctacacctaacattactgatgattctagaagtttatgtcagattctgatgaaacaattacagaaggagaaacagctattctctggtgtggaaggtggtcctgaagggtgcaaaaataaagatgatcaaggacttgaaccatgtggtgaagaggtccccagtgccaatgcaaaatctctaacacaagataatgaagtccacagaactgagggaatttctaaggaaagtgatgtaggtgtgctgtgtaccaatgatgaaagacagggtggtcaggggaatgcaaacaatcccaacaacacagctactgcatcagaagcagctgaaagtgagaaagggattccttgtggcagtgatacagatgaggactgcttaatcattgatacagagagtagaagttgtgatgggaagacagctgatttaggttctaggccaaattcttcagcacaggcttctgcagggaatcaggccactaccactgtttctgaggaatcttgtgttttaaagaaacctatcaaaagagtctacaaaaaatttgatccagttggagaaattctaaaaatgcaggatgagcttttaaaaccagtttccaggaaagtacctgagttgcccttgactaattcagaagaatctaaacagccgcctgcttctgagcaaccctctgctgctttggatgccgctccctggccaaaatccagttggccctctgcatttcaga

SEQ ID NO: 35083 - DNA, 1233 bp, Mus musculus
ttagctaagcttataggtgtgcattaccaggcttggctgcaatcccctttctaaaagatcctgacatttctatatctatcttggtctatggtcaccaaggacaattgtgtgtgtgtgtgtgtgtgtgtgtgtgtgtgtgtgtgtgttttggggggtcagtgcagccatgcttcttagggcacacgattaaagccagggacagctaagctgttagaaattatttctccacgtcactagttattttcatgcatccttaaagtccacaaaacttcaaagggaggcagccaaggttctaccctgtcctgtgcagaagggcgcaggtgcaggagaaactcgggcctgctgcagaaggccctgcaggacctgcagtgtgggagacattctccgccctccctcgcagtcctgacagggtgacgtaccatttcccactgcgcttcagagggccagggctttggtccactgtgcaggcctgcaagtccccagggcacaccaaggctatggcgggttgctgtacaatctattttttttttcttctgacactacttttctttctttctggccactgcagcaagacaccaagggtgactaccagaaggcactgctgtacctgtgtggtggggatgactgaagggctcagcacagtggatcacccagaagtggctctacctgtgccccaacctggcgttctagagacttcgctctccactaatggacccctgagctcctccctgtgaggatgatgacagggctgccgaccctttccccatcttagctgcccttgcctggctttctcctcattctctcctttatgccaaagaagtgaacattccagggagtggggcgtagcgtctgtgacatgagacacttcctcttatgtactgtgtcgtgaataaaccgtttttactttagaaacaagaatgccgttgcctttgctttcaagccactgttcagaaagcagacatacttgggatttgattgttcgcccagggaggttgcccctagaggatgaaagttctagaacttatctcttccctctggtagccactatacagatgcacttttttaaaaggatgagtgaatttaaaattatatacagttcaaattttaccccttaggcaagggctacagctcttatctgtgtgtgtacttctccttggggacagcaaatgttttattcacccagatgaacgctgacaacacaccagagaaatgattccaccgcagtctaacttg

SEQ ID NO: 35084 - DNA, 1674 bp, Mus musculus
ctgtgttttttcattgaacagagttgatcaagagcttaatggaaaacaagaaccaccaaaaagtgagcagtaagttccgtgtccagcccggacaagagagagcaccggggaggcggggctgtagtgcatcctattgcactcatggctcatgtgtttatgtaatcggttgcaaattttacttgacttctttccaaatggactcttgtacaagggactgttcactgctgtcatggtttgcaactcttgaatttagctctttaatgactaattatattgtaatcattttatattgctaaatagtaaagagctacactttataaaaagcaatttttacatttgtttatttgaatgatgcatcttcagtaaagtatttatatacataaatgacaaaggaaagaaataatatatattttttatgttgggggcaataatttttagtgtgtacctatctcgtggatgaatatatacacgtaaataagaccacgattttaaatgtaaagtgcatgtaagactttgtttttgtaaatggttggatacatttcctgggtaacaggctgggttgtcctaaagcagggacaggtaaatgacgccaagaagtacctaaggtcatgcatgtggtcgagacagtagtagcagcctgagcttctcctccctgaaagcacattgtttcttaatgtggtggaagggcaggtgagtgaacaacttgctttcctctctaaagatgtgttagaaccagaactagagattttgaaaagctagtagttagggtttatatatttgtatataagggacattttactttacccaaagtcaggactgtttaaaaaagaaagaaagaaagctcttaagatgtgttcagtaatgtgacatgagttgtgccatgtgtgtgaagctgtgaggggttgcagaggctccgatgagtattcatgatcagctgcgtctgtagagcagatggaatgccattgcagtgctctcccagtggggcactttaccagaggacttcctcgtttcctcgtcggctgttggagcacagtggggtttggcctacgcagacgttgctgttgggtggtgtacagtgctgtactgggtcgattctgtaaggattgaagtgctgctgccgtgcactcaggacaacatttgctgtctgtaagccttcatttcatgtggttacgtaccttgactgaacattgaaataaatattatttgtgcctccaagcagggtcttaattaccttcaaaatcattctaaaacaatgaatttgtccagtcttgtgtcatggacttctctggtgtatacatatttagtgcatatcagcttcatgacacccagcccttcatatgagcggtttacaaaagtgatctagcaaaacaacattgaagcaggtgtgagctaagcttaggtcattttctcccacacgtagcacatgaccttcaccactgtcagtgtttagggttaagtttctattgcaaaagagaatttttctttacttctttgtccttctcaggcatatatttgacctgctaggttaaaaccagttatgatcaagctggaagactttctgggtaaaacatttctccacaacctctcagcctagatccagcactagtgttattgtagtacgctgagccaaaaccattttacttgtgtaggtgaaggaaaccaagaataactata

SEQ ID NO: 35085 - DNA, 1708 bp, Mus musculus
caccctttacttaaaatcgtaaatacaatttttacaacgttatttccctaagtgcagttgagcccgattccctcagattttgaaaggcttttatgaatgaaaagaatttattttcaatgcttgatgctctagccaagactactattttggaaaaaaaaaaaaaacccaccatggtgatttttcttttgattaaaaagtgaatgagttgctacaggtatgtattgcccctcaccctacattaagagaagtcctggtagagttcagctttaagtccacatctggattgtatttttgttgtctatatggttttttttttttaaatgttgggttttttttttttttttttttttgtaaatcacctgtcttttgtagagaagaagtttaacactgggagagaaaaaaaaaagccctgcaatttatataatgaaaatagttttttaaaattgataattgccatacagattataaattaagtagaaacttacaacgtttatctagatcccacaaggcacgatatttatatccacctaggggtaccggcttttactatttaaagctatttttgaaaccactcacaacctgtgtagtgatagccatatatttaataatgggatggtggctaagcaacctgtttatcgaacagctaattgttcatcagttgtaatgaatgttagaatttttcagactttacgatttacctaaatgttccctaaacaggcactacgtgctagggtttatagacatttgttgtaactgtctatcttgtgccttggttttttttcttacgtcgctgtactgtcctctgtaaaaaaaaaaaagaaattacccacaaaatagacagtgtggtaaacacatcagggttgtggtgtaagactgagatcctatgtaattttaagcatcctaatgatttcatcgctgtcatggtgggccgcactcagcatccttcatggaatagctgcacacacctttgtatggacagagaggcaaagcgagactacatttgtaatactgcgaggagacgggtgtcccggcacctttgcaggcgttttattttcagttgccatgtttgagtcattgaagacttgagcctgtgccatttgcacttctgtgttaaagtgagggcacagagagagagagggagagagagagagagagagagagagagagagagagagagaacaggagcatttaaaagttccaagaacaacaccccatcctttcctttcctctctcatgtgcaaggactcaggaaaatcaaaagcattttctatttctagaataaaccacactgagattctacctggctcttactgttgacccatgtaagatatgctgctaaagtacctaatattctactcttgggaccttgaaaactttgatttgagtttggatgcatgagaggttatgtgaggaacatgtacccatcctgcatttcttcatctccccacacatcgtttcgtctccatgcaggaggatctgcccacctaggagaagtcagcgatgcttcgtgaccagacagtgtggtttcttctttccctgtgtgctcggctagccatgttttatcgagtgattaagcacaaatctcactcaggacagggccacacctcctcagtgtctctctcccctggggactctaagggggaagggtgagcacacaggacacttgggaggaggagacaggggacacctgctgaccctggcctagcag

SEQ ID NO: 35086 - DNA, 1149 bp, Mus musculus
acaacctctagtacctccagtttcagggggtcaggtgccctcttctgatctcctcagacatcagacatgcaagtgcacattcaggcaaaatacttctacacatgagctaaaaataaacacatctttaaacaaaaaggatgctttgccttgtctcttatttctacttttttttgagttacagtttttctttgtgtgtgtatatgtgtgttcacatgtatgaatgcatgtacccgtggtgtatgtatagtggtcagagagcacttgcaggagtcagttttgctcctccaccatgtgagacctggggcttgaactcaagtcatcaaccttagtggcaagcacctttacctgctgagccatcctgccagccctgcctcatctattcttaatgatcaccaaggaaactgcttgcaggaatagcagagttatattaaacttactgcagtatttgatggcagttactgtcagtactgtttgtgtttgttctaaatttacctggctgattattaaatcactttgttttgtttgactctcagtggaaaactagacaaaaagttttcctgtaaactctttcccgtctctgaagacagttagtacctgtgtgaccagatcagccctggctactccagagaaaacgtttctaggccgaagtgactatacatctcatgttgtagtattcaggcggcttaggagtttgaatggctttcacactcctttatttgctctgacatggaattcagatgaggccaagatggtctagccttagaatttgcacatttatttctaattttgaattaactgcagggcccacgtaatttagttcagaaagcttaagtgtgacacattaggcacagcctgggcttccatctccacacaaggtcagtgtctttcacatgcagctttcagcaatgtgaataaaaggtagatggacagactgggaaccctttgtttcctcttgggggttgtgtttaatcatgctcctctagtcagatttatatttgtgcttatttgtttggaggcaagctctcgtggggcctacgctggccctgaagttcttggagcctaggattgatctttctgcctctatcttctgcatactgagactgcaggtgtgtaccaccacaacctgtttatgtagcaccaaatgagcct

SEQ ID NO: 35087 - DNA, 1185 bp, Mus musculus
caggcagccttgaagctcagattttaagcatcttacagttgctaagctgtgatccccattttaggactagaaatctgtccctcactcccgctgggactacactgcaggctgtagggctcagtgttcctctctactggcatttgcttttcgggatgtttccagaaaagcaaatgcatccagagctgtgactgggagacactgaatggcaagaatgtggctcttatataacacagacacagaagaacccagacaacagtctcagcttccttcaaaccaagttcccttgcttacttctggaaatttttaaaaagatttatttgtgttcatttttattcacatgtgtatgcatggcagtgtggacataggtgcacctgagtgcaggtccttagaaaatccagaagtccctggagccataagcagttgtgagcttcctcacgtgggttctgggcaccaaagtcagaccctctgcaagacaataagcactcaactacctgtccttctctctggcccctttctgtaacattgtcgtggtgattagacattatctgtagagcttgtattggtctgttttactttttcccccctcaatggctacgtaagccactacttggatgtggatgaggagtttcctcagttttacaagctgatgaagtgcagatctagaaatagctttgttctggtgaaaaggggctggtcactgcctagaaaggtcctctattcagccctgccccgtctaggtccatccttctcatcctgaaatacacaggtatgtgctgaggagttggacagtctgaaagtgtttctgactatcatggacactcggcactccatagctctgttagtcttcatgattccaaagcacagctcactgtgagacccatcagcatgagctgtctgcatgacctggctctccagagtctgatgtgggcatttgttgtgccagctctccggagagcccaagactaactgctccagtctggctgcagccgccgtggtttctgccctgcaccctggtcgctccttagagactgcttgaggcaggaagtctggacttccatgctacacaaaagtagggcagccctcttcccacagcagctcaaactcagctctggcagaaactggaaggttctattctgaggctgttcgcagcaagctacatccgctcatttgctctggctacctgct

SEQ ID NO: 35088 - DNA, 2206 bp, Mus musculus
ggaagtcatgcagcacatggccaagaacgttgtgaaagtcaatgacaaccgtaccaagttcatcgtaagtgctcccgtaccaagtcccgatcccgggaaagcattagattctgggctggctgtgtgtgcacgtgttgttctagcaagcatggctgtcatagcagagtctctaaggaatgggatgtactcattggttcaccttgactacctaaggtcagtgtgtggtcagccagcccgtggattcccacatctgcatcagcatcttgcgtaggtcacactcactagtttgtatgtcacatactccatcaacattctgattgggcaccagcaagccaggaaggctgttacccatgggtctgggaagagagccccctctagtggcctcaaattcagcagctcttaaactcagcctttttgaaaggttcatagtgaacaaacatggagaagggagaaagaactgtgggggaaatgggaagtgttattatgcctgtgggacataacaatcagaatacgcccaagtgacagagggcagagcacttgtgacctccctgcatgatctgcctgctgactcgtaggtatggtgtgactgtgaaccgtggaggcacagaagctgggatttggaaagcactagtggctgcacacttttaatgccatttaaaaaaaaaacatgatataggtgttttgcctatcacatatcacatacatgccaggtgcctgtagaggccagaagagtgtctgattccataggactgaagttataggtggttgtaggacactggatgcgggtgctgagaatccaacccaagtcctctggaagagccaccagtgctctccatctccccagcccctcatttctagtctgtggctgcccttcccagtagcacatatcaatgacagagagccttcatccctctgagatcctgttcttcagaccttgagactatatttccagccgggcaatggtggcgcacgcctttaatcccagcacttaggaggcagaggcaggcggatttctgagtttaataccagcctggtctacagagttccaagacggccagggctatacagagaaaccctgtctcaacgcccccctccaaccctcaaaaaaagaaactatatgaaactatttcccctactggcgatgtgaccagcggggttggaggagacagcttggtggcttggtgcagggtgctgtgagggagagacccaggattgtgtgtcatcagactatctggagatggcagtcacagcccttacactgtggggtagactaggtatactggaagcatacttaaccccagctggcttctgcaggctgtcaagaacaagtatgccagcagcagactcctgaagatcagcacgatccctcagctgaactccaaaatcatcaaagacctggcctcccctctgctgggcagcccctagacactggactgccatcctgcgcttctcagatcctgtatgtattttattctagtttacatcacaaacctcttctcaaactcattttctaattgtgtattgatgaaaaataaagctattgattttcttatactatcctgtgtatgtttgtatactctacactgaagaaatgtagaatggcctacaataactctgctctgtattgaaggaaaataaagctattgatctacttaaggtatcctgtgtatatttgtatagtctacactgaagaaacagtgatttacccatgctttggcttttgaatgtgtatcaatggccaaacagcttcccatccagatgaaccttggctagtggtccatgtgttcctttataggtcataggtgagtgtcagcattcaagaacaagccaacagaagaaataagctgtttttaccaaagcctaacccaagatagtccctggctagatttggagtggacacctgtatccacagtcagctgcttgagtgcctgtaaatggagggagacatccccccccaaaaaaaaaccccaaaaacttagaactttttctttaggctctgctaacaagaggactctaaatataggtgggtcacttcttccatgtaaatgcctcaggatactggggccatgcctcctgacaggtttttgagtaggtgaggttctaattctgcttgagaaggcagctgagtttagaggaatctggggtatgagactctggtcagggctctctactctcattctctttgtgcgcatccagcctgacaaca

SEQ ID NO: 35089 - DNA, 1207 bp, Mus musculus
ttaaacttggagatccacttgcgtctgccttctcaattctgggaatccaatgtgtgaactactatgcctggcttttttttctttttttttttttttttaaaaaaaaagagggactgtattttgctaggttgcccagactgaccttgaaactagagctagcttcaaaccacctcagtctgccttacctaggccttcttagtaaccatggctgagtatgtctcccaacatccatctatatgcagagttctttttttttttcaaagatttatttattattatatctaagtacactgtagctgtcttcagatgcaccagaagagggcgtcagatctcattatggatggttgtgagccaccatatggttgctgggatttgaactcaggaccttcagaagaccagtcggtgctcttaaccactgagccatctctccagcccccatatgcagagttctttgtgtaaggttgtattttaaagggagcctgtctctcttaatagaatgtacagttggagttatggcttgtcttttaagctgagtgtattaattgaatggaggttgatgtgatagtttgtatatgcttggccgggttagtgtccctgttgggaggtgtggccttgttggagtaggtgtgtccctgtgggcatggctttaaggcctggaagtcagtcttctaccagcagccttcagatggatatagaactctcagcccctgtaccatttctgtcaggatgcttccatgttcctgtcttgaggatactggactggatctctgaatctgtaagccagccccaattgaatattgtcttttataagacttgccgtggtcatgttgtgtgttcacagtagtaaaaccctaagacagaagttggtaccagggactagggtattgctgtgatggacctgaccatgcgtttgtttggaagaatgtggattttgggactttggatttagaaagcagtggaatgcttttaagtggggtttaatgggctattgtagtaggaatatggaaggctttgttgctgcgtgtcatttgaactgtgcagatctggcccaagaggtttcagtggagaaaaacataagtacatgacctagagactgtttttgtggtattttggtgaagaatgtggctgccctttacccttgtttgaagagtctacctgaagctaatgtaaagagactcagattaattgcattgacgaaggaagtctc

SEQ ID NO: 35090 - DNA, 1499 bp, Mus musculus
gcagtcttgagatctaattctcttctctagtttaatgaaggaagctttaaaggaagtgtttgattttgaccaaatatgctatattgtgaaagttagcaggaatactgcaaggctcatttggttattagaagttgtcaagacttgtgtactagttagctgtgtctgtgagagtggatagaagcagagatactagaagagttgtgagacagtcaagtggctaactctgcttagtcacactatgtcctcgagtggaagaatggatgctttatggatgctacagactctagatggctgtgcagcacagatgtacctagttctttaaatgcctgccttgtttctcctaggccttccctgaagtttcccatgtctcaatggactcctgaatttaacgagctctacaccctaaaagtggctatgaagagtgggactcctgatgcgcccactacacaggagagtctgaaggcggtccttctgcacccacagcccctaggggccaccaagagcttccctgcagaagtggagatgattaatagcaaagtggggaatgaattctctcatctgtgtgatgattctcaaaaacaagagaaggacatgactggcaaccagcaagaacaagaaaaaagtggtgttgtgagaaaaaagcgcaaaagccagcaggctggcccctcatatgtgcagaactgtgtcaaagaaaatcaggaaatcctagggcgcagacaacagctagagacaccgagtgatgaggataatgactcttccttaagtgagtgtctgtcttctccctcatctagtctccattttgggggctctgatacagtgacttcagatgaggataaagaagtctcggtgagacatacccagcctgttctgagtgctaaaagtagaagtcacagtgcaaggtctcacaagtggcctcgaactgaggcagatcctgtgccaagtttgttaatgaaaagaccttgttttcatggcagtgcactaaggagagtcacatgcagaaagaggctggtgaagagcagctcctcgcagaggacacagaagcagaaggagaggatgctagtgcagaggaagaagcgggaggcgctagctcagaggaagtatgctcttctctccagctccagtagctccagtgagaatgacctcagcagcgattcctcgtccagctcctccaccgatggagaagaggacctgtgtgcatctgccagtgagaaccccagcaaccccgctgctccctcaggtgagaaggctggagtgcagtcgcacagtgaaactgtgctcacacccagttctcaagccaagttctcttagcttttattctttttgtgaagctcttagcatttttaattagtgaaaacattaactgcaaaccttgattaaatccaactcataagacatttagacataaggcaccaagaacaatgtctggaccatgcaggagggacaaaacacacttctctatgtacaatggcccaatattatcccatgtgtataactgctat

SEQ ID NO: 35091 - DNA, 1113 bp, Mus musculus
gagccatctctcctgctcatctttgtatttataataaatacatagagcattgaagcacattttaggtatatttagacagtgttttattacagtaacctaaacaacaaaactgtatgtcttcgagttctagagttcaagatcaagcagttggccatttctactgagatttccctttggcttccaattagccaccttgctgtatctttttttttttttttttttaaattaggtattttcttcatttacatttctttttacatttacatttcaaatgctatcctgaaagtcccctataccccctgcccactgtatctttatatcgtcttttatttgtgtatttgtagccatcccccatttttctgaatttatttatttattatatgtaggtacactgtagctgttttcagacacaccagaagagggcatcagatctcattacagatggttgtgagccaccatgtggttgctgggatttgaactcagaaccttcagaagaacagtcagtgctcctaactgctgagccatctctccagcccccatttacatttcaaatgctatcctgaaagtcccctataccctccccctgcccactgtatctttatatagtcttgtgtatttgtagccatcccccatttttctgaatttcctcttaaaaggacattagttagattatactaggagccatccatatgatgctgaaattttttatgactgtgagtcaggtgaaatggcccaagcctatgatccaaaatgaggatgctgaggcagaggcaggaggattgcaaggtcaaggctggcctgggctacatagttccagaccatcttttttttgttttgttttgttttgtttttgttgttttgtttttttgagacagggtttctctgtatagccctggctgtcctggaactcactttgtagaccaggctggcctcaaattcagaaatccgcctgcctctgcctcccaagtgctgggattaaaggcatgcgccaccaccgcccggcagttccagaccatctttacctacgaaagatgtttcaaaatttcaaaaacaacaatcaatttctttctctctctctctctctctctctctctctctctctctctctctcca

SEQ ID NO: 35092 - DNA, 1182 bp, Mus musculus
tcgaaaaacaaaaaaaacaaaacaaaacaaaaaagttatggtaataaagggctttggtatcatgcattagttacaacttagttatatgtgtccctgcttttaccccaactccatggacttgggtctttaatagagggaaatagactgacagaacaacaacaacaaaataatagtaattaagatttgttacatttgtttaggtgtagtatggttgttgtacattggatctgaatttattgttaacttttcttgaagttatagccttctcaattagtaaaatgagtataaaattcataaatgttcatttctagcctctggttttgggtgtgtgtgtgccacatttaatagcttctatttttagttctttcaatattcactgttagatttatcaggacagctctctagaaagaaatgctctatggagagtataaattgatgcgtgtatgcaaataaagcacatacatatgcattaaccttcaatgaagccatatttgttcatggtagtggataattctgtccattggagaagttactcagagtgttttgtttgttttgtgttttccgaagatgggagtgtactataacctggttctcattgaatatctcaggctggccactcaggtcaccaaagtgctggtgattacaagtgtgagcttgtgtccagttttaccaaccttttacacctttcagaaaattctaaatatgaatacaccccccaaaccccaacccctgattttgagaccaggctctcaggcatctcaggttaaattcactgtaaagccagaaagttccttgaatttctccccctcccctcccctcccttcccccccccccttctttctttctttccctgagactaggtttctctgtgtagccctagaattcactttgtagcttaggctcaaactcagatctgcctgcctgtgcatctcaagtgctggcatcaaaggtgtgtgtcaatttaagtatattgaatttctaatcctcttctagatgtgggatagtatgggctacagcattgtttataaaaatgatactttggttttggtttttcgagacagggtttctctttatagccctggctgtcctggaactcactttgtagaccaggctggcctcgaactcagaaattctcctgcctctgcctccggagtgctgggattagaaatccacctgcctctg

SEQ ID NO: 35093 - DNA, 2087 bp, Mus musculus
actctcaactctccagccccacatttcccctccactgtcaatcacaggctctagcctttattgaccagttaaaatggggagaaagttcacatgtacctgagtacatggtgggctgcttgtcagagccatcccctcttgaggaagcagaattaacatcagaatgtaaacagcattaggacaatccacaacatttccctctttttttttttcccaattaaaaaggctccttctcttaaggtaacaaacaatatatagtaggagctattttgaaacaattataaaaactattaagtaatgtcagtctattatacttggcaatcaagataaaatcttaccctaactaaaagagtttacagctccatacctcaggcatgtttgaattttaactcgtattaccatctgaaaaaccatcctttcaaatctagaacatctttaatgttaactaacttaagttcagttatgagactataactagtcttcaaccccatcagagatctgagaaggaattaggtataaccttaagtataatatgtaggaagcacaaagataaagtttacaaagctaatgtaaattgtagagacagctgactgcctggagagtccccaatattccttaaaatgttggagcatctgttttcagtcttctagcccagaaccatctgacagaccttaagtgaagcgggaactaagaaggactagcttaccctgacttggtagagcttagcagtcatctatcccagatccagtttgcccttttttgaacagaatcttgtctatagatggaattaaggcaattcttgcccaatggctagcttgccgtaattggagtaactccttatggaggtaatgatgcttactatcttctttgaagtgggtgggggcaccttcaggagcagacatgtttcttagtcaaaagatcttttaataattaaataatattaaatgccatattctatggatctctgatgttttttttaaagattatatagtataactgaattgtcaaacattgcttattcttagctattcactatttgagtaatcttgaaaacacttgtaattaactaagttagaatctaatataaccatgagtttcactgtttagctattaacttgcagtacttagtcaccctagacagtttgtactagcagatgttaaaaggactgagtctaagccttgtattcttaaatgagttgcataggcagaaggcctatctaactaacaatattttaaattttgtatcaatatacaaagatttataccaataaaaaccttaaaccagtatcagtatataaattctgtaccagtgtaagaaattataacttcaaatttccatcaaatataaagatttctaccaatgtaagattatagctatagaatgatttgtttaagagtaaatttagccggtagtggtggcgcacgctggtaggatttgctgaaggaggcagaggcaggaggatcacgagttcgaggccagcctgggctacacatttagaggggctggtgagatggctcagtgggtaagagcacccgactgctcttccaaaggtccggagttcaaatcccagcaaccacatggtggctcacaaccatctgtaatgagatctgactccctcttctggagtgtctgaagacagctacagtgtacttacatataataaataaataataataataataataataaaaacattaaaaaaagagtaaatttaatatcctatccctatttacatatttgtctaatttctataatgctactatattctcccttttctttttcacccctttatctaaaaaagaaggatagagaagaggagaggaaaggtagaaatccctgtgtctaagcgctctagtttcctccctgtcaaaaggtagaacatttacaaattatcccttaaaatggcaacatatctataattcataaaataaccagagccatccaccttgacctcaggaactgggacgatgatcttttgattgcttcttgttgaattggggctgagaattcctttctgggagcccaaagggaaaaaagaaaattggttttgtcaaaggaaggctagttggtatcatttgccatccagtct

SEQ ID NO: 35094 - DNA, 1173 bp, Mus musculus
tagagctaatcccaccctgtgtctcccttcctatttaaattgatagtgagaaattttaaaacaattatcattatattatgcatacttttcaagcatagactgatgttacaattgggaatttattattaatttgaagtaaacttcatgtttgtatatgcatatgacttccaggctctttgatattaaatgagactggcacatggagaatgtagttagtccacttcttagaagctatgcatgcatctggacagtttttagactgtagcatggtaattcttaaatacctaaacttaaagtacttctctaggattcaacttgctatttcagtgtgaaagttgagattcggtcctggctcattggttttggtactgactacctgtaaaagacagtttatgtgacaggtaaaacacttgcactttcactccaggactatcgtgaagtacaatcaaatctgccatatatagagttgtaaatttccgaaagtgtttggtagataagacacaccactttgtctctagttgtaccaaattttcttaccattaaaaggactgtgaattggagaatcaagagacacatgaccaagatggaaatgaagagctaaaggacttggaagaatttggtgaaaatgaagaggaaattgtgcattcccaggagttgctttctacagaagagaacaagacaactcaggaatttgtagaggcagaagcaatagaagatagagaaaaagaggacatcgaaagtcaggtctttagccagttttgttaaaacatgacacagataaattatgatttactaatagaaaatattttttttctagtttgatatggaggtctcagaacttagaaaatttatttataaattacttagaatcctatcacctaaggcttttacattttttgcttattttacatgtatatttacatagtttttgccatgtcataaattgctgttgattctctattttgcttttatataacatgccataatgacttcataatcaggctactttctgtgtgtctaatagcctctttacaaccttggatatttaaggtttgggtttttgtttttttgttttttttttcatggcgctagagatgagtgtgccaatttcactctgaccttaccagtactactgggtggtagggccctccacccccttttgctgctttagta

SEQ ID NO: 35095 - DNA, 1119 bp, Mus musculus
agttaaagagctaaaacttcagcaaaacaaagtagtttaacagcatttctaattagcagaaactatagcaattacttttttttcaaatttacttttttaaaatagcaaataatttgtacatcttcagtctatcatgttgcacctttaatagaatagcttggaagtggtatagtgtttattaaatttatttaaattattgtttattaagttcttggggaactagagagctagctggtggttaagagtatacagtgctctttcaaatgaccagagtttgcctttcaagataaactagtaagccatacataaatgggttcagaatttgagaatagcttattttccccttgcttccttgagcaaccactctacccaaagcagcattctttacaagtgctgcacttcagagtgtaatcaagagcccagaggtagtgatttatttgtttaaaattttaattgtgtgttggtacgtgggtgtcacagcacacctgtggaagttagaagataacttgtgacgaaccaagtttattaaattcttgggaaactagagagctagcttgtagttaagaatacggtctgcttttccaaaggaccagagtttggttcctagtattcatggtggtggggagctcataactgcctgtggctccagctctgagggattctggaccttaaagacaactgaagtacagacagacagacagacagacacacaaatattaaaacataaatgaaaaaaggaatcatggtatgcagtatcagtatacaggtcgtatttacattgctgttggtttataatacaagcatgtggtctggagctcagatcccaagcgttcatgtaaaatcccaaagtgatgcactcctggaactctggagtgctgaggtggggaggacaggatggcacaggcagatccctgcagctctctggcaagccagtttagctaactggtgagctccccgtggaagatcctgcctcaccacaaaagggaaaggaagcgattgaggaaagacacctgccattgacctaggcctctgtggatacatggaccaacactctcttgtgcatatgcacacacgcaaacacacaacattattgttgttctccatgataagaaatctaat

SEQ ID NO: 35096 - DNA, 1166 bp, Mus musculus
tcactggtgggagagtgctgtggtcttcttaccttcaactggaaagaggctttgggaggtaggagctgaagagtcaggagttcagacctgccaaggctacacagccatttgagcctctcccccataaaaaacaatagaatgtgtgaatggggaatgctaattttggatgtgccatggctgtaacagtaaaccatgcaggctggtagtgactccaccgataaaatctctcctgaaaaacaaaccagcctttgtattagacagctcaatttaaaagaagatcattgcagtaatgagggcttttctggcagccttgccataatttcccttaaaagaaggtttcatcactataggttatgcagatcaagttgagaatctgagcaagtcaacacttctgaggacctgtatttgtttttcttcaatagacgggaacggtttgttggtcaaagtgaaggaaagaaaccgagaccagcagcccgaagagaagagccaagttttgaaaggtaccctaaaaacttcagtgattccagaagaaatgagcctccaccaccaagaaatgaacttagagaaacagacagacgagaggtccgaggggagagagacgagagaagaacagtaatccttcatgaccgacctgaggtcgctcaccccagacaccctcgagagactgtgcccaatccttctagaccaacttcctggaaaagcgaagcgaatatgtccacagagaaacgggagtcacggtagttcttagtaatttcttcatggtatactgtgcatttactgtgcatttgagtttttaagaatataaagtgaggttttgattcttgtgctatgttaacagagttgaaaggccagaaagatctgggagagaagtctctggacacactgtgaggggagcgccccccgggaatcggagtagtgcctcaggctatggaacccgagagggagagcgaggagtcattgctgacagaggaagcggaacacaggtaaaagctgccgaaagctacctgttgatgcttacgtttttctctcattttaaaaatcaaatttttattttacgggtgttttgcctgcctttatatatctgtgtgccatttttatgcctttgggattcaggtctcctggaactagagttacagacagatgtgagtgggcggggattgagccag

SEQ ID NO: 35097 - DNA, 1266 bp, Mus musculus
ggtggtggcatatacctttaatcctagaatttgggaggcagaggcaggcagatctgtttgagttcaaggccagcctggtctacagggtgagtttcaggataaccagggctgcacagagaaaccctgtctcaaaaaacaaagcaggatacacttccagttcttagtttcttccctggtaaggaggggttgataacgaacggtatgcactgtacaggactagggtcttggctgtggtgagtaaggcagagagcagcctgtgcccctaagcgtcaggggctatgaaagcagcttgtgattgttggtttgttctgacctttgtttcccttttaaccccttcagcactgcgtccccagtgaacaggattgtacagatgagtggtaactccttgccaagaggaagcagctcggggtttaagccgtttaagagtggacctccacggcgattttaacgcaagcttcctgctgtggcttcaagataatttattgagatctcctgtaaacgttccctgactgcttactaggagaacctctgactgcttgagagttctagctgactgttgtttttctttataaaaaaatttaacacgatttcttttctcaactttagagaagatgtttaaatagttctgttgaaacttttcatagttttgtgtaccattcaaccttttcttgcagcactgagacccatttgaaaggattggcacaaggctgttctgtttggcactgtgtgaacatgagtggtttgcagctgaatggtagtggtttcatttgcagcgtagctctgtggtgtcaccagtgttggctgcctccattttgaaggctatttgagcttcaaaagcctgctgtctaatttttagagaataagattgttccctgcatttcggagtattatgtaacctatttttgcagaaggtactgttacattaagtgcatctgtgtatcctggttaaaaaaaaaatgtaatctttttggaaataaaccttcatattctgtatagttgctaatgtattgagaacctttttaattgtaaactgaaggtaaaatttccatatagggagcaacagacttgttcaggtttgcatggtataagaccatggagttgaaggagatcttgtccatgtgtcatgaagttctcagtttactgagttgagcaggtaagtgcacttgtgggggatcttcatgttttgatagatggatcccaattctcagaatcttgtgataacattcccatctttccaaaataatgcggagacgtggacgaagccca

SEQ ID NO: 35098 - DNA, 1100 bp, Mus musculus
tgttggaaactaaatcaggttctctgcaagagcagtgcatgttcttaagatgtggcatctttccagtcccacttgttttttaaatgccccaccactgtatttaatcaacaatagtttaatcagtgtaatagttaatagtttaatagtgtaatagtttaattcagtgtattcaagagtacttctaagtccagctctgctgtgcattccttttgccactacttaaggataaaggacaaacctttgcctgtagagtcacttgcctactctcacaccccccatcctcatcccccagggtctcacaatgtagaactgagagatcagcctgcctctccctcgaaagtggtgtgattaaaggtgtgcaccaataggcccagcttcttcccttttcttccctttaaaacaaaggacaatttctcattcaaaagtcacttttaaaataactaaaataacacaatctaaataacttagattggcatgctgtggggaggaagctgcccctcttagtcaaactgttaacggattactgttatggtcactgattctgtagtgctggtgagtggctccgccctggagagcctggtaggtaagagtctttactattctgctgccccttaagccacacatttgtctcagcagcttaagcatcactcagaacaccactttccatttctaatgtaaacaggaacagggaggcaaaagcaagcctcacagcttattttctccctccttatactgcacagaccccttttaaaatcccaggttggtgggccatagtggcgcacacctctaatcccagcagaggcaggtagatctctgtgagttccaggacagtcagagctacgaagtgagctcctgtctcaaaaaatcaaatcaaatcaatcaaccaatcaatgcagcaggcactcaatcaatcacaggttgatctttacctggaaatataccatctcttgactcttcacatttgtttttctacagtctgccaatgttttaagataatcaagtctctcacattaaaatgtaaaaatggtgaggggcagtggggtggcttcataggtaaagactacctgcattcgattcctggagccgatatggtagaaaga

SEQ ID NO: 35099 - DNA, 2439 bp, Mus musculus
tcagaggccccgagagagttatcaaatgggacacatgcgacgctaatgcagcttttgccttggttcttcctagtgcctacagtgggaaaacttcactccaaagagaaacctgttaagtcatcatctgcaaatgatacccttacagttaatagttgaagaaaaatggcaagagatcatgtcctcagatcaggtggaattactcaaaatttaaagcctgaaaattccaattttgggggtgggggtgggatggaaaaggaacccaattttcttatgaacagatatttttaacctaatggcacaaagtcttagaatattattatgtgccccatgttccctgttcttcgttgctgcattttcttcacttgcagacagacttggctctcgataaacttttatcacaaattgaaatatatttttttcaactgccaatcaaggctgggaggctcgaccacctcaacattggatacatcacttgccaatgtacataccttgttatatgcagacatgtatttcttacgtacactgtacttctctgtgcaattgtaaacagaaattgcaatatggatgtttctttgtattataaatttttccgctcttaatgaaaaattactgtttaattgacatactcaggataacagagaatggtggtgtgcagtggtccaggattctgtaatgctttatgcaggcagttttgaaatgagaatcattttcccttttcttatggtggagttggttcttacatacatttttttccttgttacatggctgctgtgagcaggagaggctgtgctgaagaacgcagctgatggcttgcaaactggacagcaacagcatttggcttcagagtcagctctttttgtagatgtctgatttctgcttagtattttatactttctaaatcaattccatttttaaattgctaggtgaattttttcatgccttggaattatgttggaaatgattaattttcatctgtagcctgcttattactttgtgtattccatatacttcaagcctgctaattctgtttttatccaatatgaaaaagaaaatcagtgtcttcattgaaatacttggacagttagttcttcagcactgtcactgatcactggtaaccactagagatgggtgatttgctcagcaggtagttgaaattgtagataggtttttcgacgttgttttccccccaacattttagcaacaatgaaggtagacagcacagtgtcccattacaaacttcttttttaagcagataaaatattggcttttttaaagaaagagaaagcaaaagcatttaatgtattaacaggcttatcgctatgcagaaaatggagggggcattaaaaaatgtaagcttgtgacatattcattgcttctgttttccagctacatcacttaaattagaagtcagcagcagtgatcttcctggctttacataggaggcaatctagagaaggttgacaagattactgtgtttggcttttttttttttttccttttttcttaagagtctaaggtttacacaatcactcacaatgtgacgcgagccagcaaggccaaaaccgctagagaaacaatgggatctctccttgtaaacttgtacagtacgcgggacttttttcaaaacagctttttgtacatgatttagagacaaattttgtacatgaaaccccagatagactataaataattctaacccaacaagtaggtagctgtgtatgacactgctttaaatcattcaaatgcctttgtttttggactgtgcaaaggttggaagtggatttgcatttctaaaatggtgacttttattctgcaagagttcttagtaacttcttgagtgtggtagactttggaacatgtacattttttgcttgtaatgttatcctgtggtagggttttgccctattttattttgagtctaagttaaatgttttctgaagagatacatgcactgaactgtttccactacaaatcaagatgtggttaaaaaatgaaaggaccaggaccagtgagatctaatactactgtcagtttaatgtccactgtgttttatacagtatcttttttttgttgttcactttggaaatttttactaaaacctgcaaaaaataaagtattgtgcaaagatgtaaggttttttgaaacttgaaatgcattaataaatagacttgatgaaatcaacttgaggtctatgctctttggactcagaaacatcagaagtagccaccatgctgaatgaaggactattcagcagaaaggtctctccatgcaagtgagggcatcactgctacagtccagagccatggtgcacagttgattgccattatcacatgtacactgtatgttgaaagttactcaacacaacggcttctcactgtttctaagcagtgtccaggacttgtcctagtgaagagctgaagctaactggaaacttgtagt

SEQ ID NO: 35100 - DNA, 2051 bp, Mus musculus
tggaccttttcaagtataaatttctataagacttcagcatgcagcattaatgttttggctctttttgtgccattttggtgtgtccttcaaatctagaaaacatgatttagtctagagaagaaagtcagtggaagatgtcagcaccacattggtgatttctaacaaaggcaggtggttcactgcatacgcgacacttcgtgtgtctattaatggctgctgtagtgccaagctggtttctcagtgtcttgtgtggaggtgagctgttttgattgcagctgggaactgcagcaggctgacagctctcggaaacattgccccatgtcttgacaggacactaatgtcagctgcttgtgttgccagagagacagtgggagccaatgttcctttatttccggtcctgccacatatctaaggggagctgtggatgtgtaacttggcctttgtgtttgttttaaaggagatgcaggcaaagctcgcagcacagaaactggccgagagactgaatattaaaatgcagagctacaatccagaaggggagtcttcagggagataccgagaagtgagggacgaagctgatgcccagtcctcggatgagtgctgaagacagggctgggacaccccgagagctggctgcagagctctcattggctcatcgaacttcctaacaagtatcaagaccagcgtcagaccttgttgagggacagcaggtttttaagttacacaaaggtagctacaaagtaagaacccagtttgtctttcagaagacgctcttcacagcttgcacagtttaatatgtgaaccttgtatttggccgtattgtgttacagttttgcagtatgttgtgcattggtctgatattttagtgtgagtagagcacacgttttctttagctgcattttccttatctgtactcttatcagatagtgctgcttacaccctttctggtgaaatactttgttaccccaggcacctaaagtgaattaggaaggcctggttccctcgctcaagaaatgaagtgtaaagaatggtccacgtgcctgcatggacatgttcctgagatgctggatgtgaaacactgtggaagacactcagaaatgttacagcaagtgcattggctgatcctgtctctctggggtgactgctgtcttcctaggatgaggacaaggagcgctgaagaggtgctgggcgggggagggtcttctgagctggtgtggggagctgctcctggcctcccttggcttgaactcattgctgtctcgatgataggtccctgtacagggcgttcacgtttggtaaggaaaccgatgtttttctaagagttacagttgacttgtgagtacattgcttttttcatttttaaacccaaagaggtgtttataggctgcagaaacctcagtcatgtatgtacacatttgtgttgtttaaaatgattatatgatcgttttgagcaaagataacagtatgttatcaaaagcctttgtctattacgtggaacttgtaaagaagaaataaaataccaatcagagcagctccccgagctcatggcgatgtgttcttggtacttgtttgagtttccgttctttaaaagcagtgttcatacatgaagttggactgaaaacacatttagattagacacatactgggaagggcttgattccatagtggatgcttctagctgtcagcactttccacatctctcccatgaagaaaaggttgctgtaagaacagtatggaacctgtggttttaaaactgctaataggtgatttcaaaacacattgttttatattccttatctggaatgaactagtgcttctagaaggctgtaaaggagagaccacactcaagcatgcagtcgcagtcagtcccccttgagctgaccacttagtctgtcaatagtcgagtgtactctgatctgctttctgtgtagccattttatatgtattatcagtttgcttcatgttttgcaaacatttcctgtgttaaatgttttatatctcaaccatctcaaccacaatatgcattttatggctgctctatagcttttaaacag

SEQ ID NO: 35101 - DNA, 1469 bp, Mus musculus
tagcttgggggggcgggttgaggggttcaagacagggtttctctgtgtagccctggctgtcctggaattcactttgtagaccaggctggcctcgaactcataaatccgcctgcctttgcctcccaagtgctgggattaaaggcgtgcgccaccacgccctgctcatagtttgggttttgactacacctcatcatcctgtggtcaggtgtgaaactttccaccctgagagaatttcatttcccattcagagcactcccttgggggaggggttagaataattttacgtgtttggttattgtcttaagccagattttttaaaaatcaaaaaaaattttttttaaacttttaagagccagcttttctttgattccattttgccttttaaatactgtgttccccatgtttaaaaacatgcctgtaatatgtatgtgctggtttctttttttccactccacagaaaattcatttgcaaattgcccgacaaaggtaaaaagatctcagacacagttgccaaactgaaagctgccatttcagaacgtgaagaggttagagggagaagtgaactgtttcatcctgttagtgtagactgtaagctaaggcaaaaagcaaccacaagagctgacaccgatgtagacaaggcccagagttctgacctgatgcttgatacttcatcattagatcctgactgttcctcaatagacattaagtcatctaaatcaacctcagaaacacagggacctacacatctcactcacagaggcaatgaagagactttggaggctggctacacagtaaacagcagcccagctgcccacatccgagcccgggcgccctcatccgaagttaaggagcatctcccccagcactctgtttcaagtcaagaggaagagatctccagcagcatcgacagtctcttcatcactaaattgcaaaaaatcacaattgcagaccagagtgaaccctcagaagaaaacaccagcactgagaactttccagaactgcagagtgagactcctaagaagcctcattacatgaaagtgctagaaatgcgagccagaaacccagtgccccctcctcataagtttaagaccaatgtgtaagtgtcaccggaacaggcttgtcataagagtgaatgtgtgtggagctcagaaaaagagttcaaagtgtcatactagttgaggggatgtcatgtgaggagcatgtgggtcggattgaccatactgtctgtgaaagtagaccagaggggctagaatggaaaactgcttttggaaaaaaaatgctagttttgaaggcaagtcattagaagggttttaaatagcagatggggagtcttgtgtttcaagacacttagacaatatttcataataaacacagagtgggagggcagatgtaccatgacttctttcagtaccatttgctggtgtgcagctctcctctcagttgctgtgtaagccaagagaagcaattgc

SEQ ID NO: 35102 - DNA, 1085 bp, Mus musculus
gctcgtggaagggagagcagaggccaccactggaaacacttgtagagtccctcaccccaccacacacacacacaccagaggaggctaaacgagatgagggcatgtctcctgtgctgtaatggagtgggcagcgagccggtgtgtgcagtatagtcagtgagtgacgcgacactggaatgaggtttagaacgaggtttgtaagtcccagcctcatctcttccctgtgatcctgacaggtgcatcctgggacaaggtggcgattaggactccaggtccttctcagctcgaatctgttgagcatcccttggtcttcttatatatacatgtttttctgtttattcctttaagaactaatcctgctcaagagcgttttctttagctagcttaaaaatatctcctgtaaaaacatacatgttgccaagtgcaatgttgagaagacaatcactgtatggcttttataaatttgtttttcctgctctggagtgtcattccaccatgacagttggaatattctggtgggtcttttagtagggattggttactatgcgttgtcatggggaagagacattttttatcacagctacctccatgggaatgacttcatggataaagcaaggtttcctttcaataaactgtcacttgacaggaatcctggctcttgtattattttctatcttttgatttctgtccagtttggatgctgtgttactgtgcaagcatgaggacccattcaatccccagaacccacacccaagaggcaagtgtagtggcgcactcctgtaattcctggggaggtggagacggggatttggggagcttggtggcccgccagttatgtggaattagtgaggtccaagcaaaaagaaagcgccaatgtatatgctgggagctacaggggttgcccagggccactctgagagactatggggtggtgagcagtgaatgctgatgaaatgttagccatggccttgatgtgctgagtcccagctggttcattccaaaatcacaaagggaagttactccagcttgacaactgagaatcagatccctgtttcctaaggttggctgcctcctctgcaagcaca

SEQ ID NO: 35103 - DNA, 1584 bp, Mus musculus
cagcactatcgccagccagatctgagtctgcttccaggcccgttgatcctgacaggactctgcagtcatctagacagagtaggaggcactaaatagagcttgtgaatggagtcagacccacggttaccacctcacattcctcctggggcctctgcgtggttgagtgaccttggatcttagatagggagctattgaagtttcagatgacctaactgggacatttgggggtaagacaaagccccattgtgcactgctgtctgccatcactccttctcctgccccggagaaggttccagtgccagctgtaatgatatagggacacatagggatgaaatgatgtatagactgaaccagaccttctcaaggaccgctgttctccttaaggatgctccagagcctttcgagtatgacatctttgtaaagttcacaaactgatcttgattatcttttaaaatatgaagctaccagatctcaagtattaagaagctggaggcaaaggagggagagtgaaggctattctggaaaccagagggggtcagacagtgggaatcaataattggtttgtatgggaaaccagctcattgatggttggggaaggacacttaggcggagtctgaggccttggttgcttattttatctgaaccatgcaaagagcagtccctactccccactgctttcaagcaagcagaatgggagacagatgagatttttaacaagtgctgtgcttcctaaaggacaagagcgctgttgttgtgtctccttggcccttttcctccatggcagacctccaagcgaagctcgctcaggcctggaattggaggaataggaggggccttgagacgaggcctatgggcttaggtatgaggctaaggagggaggcatccaggaagttcatggggcaggggatgagtaagtgggtatggggctgatgtaagaaggaatacagagacgttcttgaaagctgggggatgtgcaagaagggcagggggtgggggttgagctggagtttggaatgatgggaaaagggattgggagtgcttgccatctgaagggctgtttttgggaacaggtgtcaggaaggggtgaggtccaagggcaagcacatgatgccaaggtagttttgggaggatgctgggcatccctgcatatctcctggcctacccatgtctcctcatgactgtgacagtcacctatgaaagagccttgtgagttgcctatgtgtaaggcagaggtgacaggacactggagcagagtcctcaggcttcctgatatggggactcctggggaccaggttaccataaggtcctgtccacagcaggtcagagttcacacagctagattcagagaagggatctgaaggatgagcatctgctgccagagaaccaagccctattacacatcccgagatccactgtctccctcgcctgtctcctcactgggtatggagagacttctgctttcagccattcttccatgtaacaagcatgtactatcatccatcaaaatgtgtcaggcacagacttgggcactggaaacacagtaaatagaagtaaaaatgttgagccggaaatgtagctcagctg

SEQ ID NO: 35104 - DNA, 1194 bp, Mus musculus
agttccaaaggcagttcctaaactctgacacttctgcccctcagctcacactctcagggaaaggcacacactgatgctgccgggctccctaccttctagaagtgcacaccggaggctgccattttctgatacctcccctgggccaggcattttgctagtgacttcttcagctctaactagagttctctctgggttttgtcttaactctggcaacccctctggaaggtggatgggattcattgtttctaaaagggcagggccaaggtcctcagtggctaaggctacagctcaaccatgcaccggttagggaagagcaaagttccgatctcagggctgtgtacccagcccctagtcactcttccatgctgtccccaaggcagggttaagccagaccccacagcccagacctggtgcttggcagggatgattggagatgctttccatgtcggaatggactccagatggagcatggcagggtcccctcataccacgccgcttcctctagatggccgacattgctgaggcctcccgcacatcctctttggagctgcagaagcagctgggcgagtataaggagaagaaccgccgggagcttgcggaaatgcagacacaactgaaggagaaatgcctggaagtggaaaaggccagactggcagcctcgaagatgcaggatgaggtaacgcctacctgccgggaaatcctctcctttatctcttctgagagtcagtcctccagcttgctttgcaaggcttctgttgagggggctgggacaggggaatgcttaaggaagctttggggcttgttttgtctctgttctctagtgattatatgtaggtagcatcctaagaggcaaaactcccactgacacacaagcgaaacaggaacagctttaactgggccacgttctggttcggtccaaagttttctgcttgaaaagttgaatcaccttttatgagcaatgacattgtgtcgatctgtgtccaaacatgtcattcgcctccgtgccttctatcatccctagaacaagatggcaggaagtgatgaggtttttttttttttaacaactttttctttttaagatgactaggttattttaacagccattttgtttggttggttatgtgtgtatgcatgtttccacatgagtgtgtctgtttgcatccacgtatgtgctggtgcccacggagaacaaaa

SEQ ID NO: 35105 - DNA, 1218 bp, Mus musculus
cctatcttcttcctctgacattcagcttgttttttcaatactgagtattgaagtgattccctcagctgggcggtggtggcacacacctttaatctcagcactcatgaaacaggcaggaggatctctgtgagttcaaggccagcctagtctacgtagtgagttctaggatacagggctattacatagacaaactgtgtcttggagaaggagaaggggaaaaaagatggaagaggaagagaggaaaaggaaggaaggacgaggaagagaacaagaaatgaagatgatgatgatgatgctaagcaagcctattgccatgaggttacatctccaacttttaaaaaaatctttaattttgagatagtctctctaggttgcctaggctagcttcaaattcaccaactatctcaggctagcctggaattttcaatcatcctgcctcatcctcctgttattgggatggcagacatataccaggaggttccagcagcaacttccttcacgggttggggaccacctatgaatactcagcactttgttctccttgttcgcagaatgttgaggtcctggccagcaggagcaactcctcagagcagagccaggcggaggctgacctgcgtgagaaagtgctgaaggaggagaatgagaagctgcaggggaggattgcggagctggagcgcagggcagcccagctacagaggcagatggaggatgtgaagggtgacgaggcccaagcaaaggagacactccgaaagtgtgaggtaagagggccttggctggggtttggtggcttatagccctccttcctgaaagtgatttcagaggtggggaaggcagtcaggatttagttaagatgccaaggtaaactgcaagcataggcctaggccacacagttcccagagactcaggcatcagatatactaacctccctgaggctcactggggaacctcccaacacctgcagaggccattgtcacacctccagtaggctgactcactaaagacatcttttctttaacacatagctgatatttttggagattttagcaaaccagttatctggtttgcccaggctttaaagtaggaagcagttaggaaaagaggtggtgagaaacggcagctgagtggcagagggccatcctgggcacctgcatgccttctacagcacggccttgccctaggtggagtttctgcatacctaggggtaaagcgtgggtactt

SEQ ID NO: 35106 - DNA, 1146 bp, Mus musculus
tatttttggtgattagcttcttgagttctttatattctttggatattagccctgtattggatgtggggttagtgaagattttttaccaatctgtaggttgccgatttgtctcatcgactatgtcctttgccttacagtttcatgaggtcccatttatcaattcttgatattagagcatgagccattggagttctgtttatgaaattttccccgtgccaatgagttcaaggttctttcccactttctcttctattagattcggagtatctggcttaatgttgaggtccttgatccacttggacttgagtactttgtacaaggtgacaagggtctattttcattcttctacattcagacaagcagttagacgagcaccacttattgaagttgttttcttttttccattgaattttaaagtatttattgattccttctaaatttcaaggcatcgattcaggcactgttggttattcagaagtgacgagcttgatcattagcagcaagatgacttgtctccttggctttgtgttatagtctagtctcctgagacaagatctaggacttgggagcccggcacagctgtcttcttcaggaaagcctggaacaccatactactcattctctgccacaagttcgagaagaagaccgctccatgattctgtagccctaggtgagtgtttgacacagaaaaccctgtctcccaggagccctcactcctttagtctgtatttctggctgtgcttttaatgaggagaaatgtactttctaagtcatcatttggaagtcagggatatttacatacaaataatatacaggctgagtattcccaatccaaaatctaaaatccagagaactaaagtatgaaacctgttgaatactgacattttatacctcacctcctgagacgggccacagccatgaagcacactaaataaaatatatacagaattacctttggactatgtagaaagggtgtatatgaaacataaatgaacctaatctttacatgtgggttctgaccccaagatactgcatgatgtgtatacagatagtcctgctacaagcatttcaggtaagggatactcatcctgtatgcgttagatacataatgaatgaagttgtcagagctcccactgttgcaaagca

SEQ ID NO: 35107 - DNA, 1183 bp, Mus musculus
gtgattgaggaagaactgaaacttgtctcagacctaggaaccaagtacaggtctcattcctctcagtaaaccccagtcagttcagatacaaacaggatttggcttctacaaaaggaagaaagggaaggaaaatgcccaaaggcactgttttacaagatagtgatgtttagtgcggattgtcaacttttataggatttggattcaccaggaagacaagctcccaggaatacctttgagggataattatcctctaagcatgcctgagagggagggttatgctgataagattatagaggtggaaagatctaaaattaggtggcaccattttcttggcttaggttctagattgtacaaaaaggaaaaagcaagttgagcacagcccatgtgctcctgccaccaggacttaacccctgtgatgagctgtgtcctcagactgggagccaaaagaagcccttcttttcttaaggttattttgttgttgttgtttgtttgttttgggttttttgtttgttttggtgttttgttttgtttcatcttgtcttttagacagggtctctctatgtagccttggctgtcctggaactcataaaccaggctggccacaaactctcagagctccacctgcttctgcctcccaagcactgggattaaaggtgtatacttccatggctgactttttctgaagtttttgccttgtcacgtattttgccagaacagaccaagtacccaagacaaggatctataggggattgaacctgaaccaaaacagaaaagaagtactccagtaaaaacctaaaaagtacaaagaaagaacagtgcatcacttgggcagcgcaagaggatgaaatgagagcttactgcccgtatttgatgccttacataggaagagggcatgcccatgcctgtggactgggcattcttttctacacatgatatcaagtgatctacattataacagagaaaagtaaaagatgaaaggaccagttatggcatggtgactgggtatgatggctcatgtaaccccagagctttaggcatccaaacagcagaattgtacaagtttaaagccagtctggacttgtaagtagtaagttccaggccagctggggttattaagtgagaccctgtcttaaaacccaaacaaacaaaaacccaggtggtacagagacaaatctgcaaaatt

SEQ ID NO: 35108 - DNA, 1176 bp, Mus musculus
tagccctggctgtcctggaactcactttgtagaccaggctggcctcgaactcagaaatccgcctgccttttcagaggtacagcttgctttttttttttttttttttttttttaacaaaacaaaactctcagaactgcaagaacctcttcaccttggttagcccactacatccagattcatatgacatgctcctgacatttaacaaataaagaacaccattaggctctggaaaactagctttctagaagaaacatggcagaaggtgctttgtagctgttcaaagaaaagtaaatgtaatgcagagtaaagtagcatagtgcttatcagatggctttgtgtgtttttataactcgttttaggtgtcttgctcagcctagtaccagtcgtaccagtcaaaagtctaatagttgaggacactggttttttttttttttttttttttttttactgtaagtctctacttacagccatcatttccttgctgaagtctctacaaccaagtttcaaggagaactctatacaattgatattgcccaaactagaatttgtaataaacccaacagtattatggagtcacactaaagtgtagaatcaccaaaatatcacaacagaactctaaacctaatgatttgatatatgtgatttttttttctgagataatgaaaatgacagtaactttaagggagccattgtagcttatcatctgacttcatggagtttcagaagagtgagtctttaatgctttctcaatgtgtagtcatttccagatctctgaaagtgtgtggttttattcactgacctgcattctcacaccctttgctgtttacttacacacacacacacacgtgaatggggcctagttaccactcaagaggccaaagcctggagagtgtacatggcccagttcttggagctcttcagctcacctccccatcaccctgcccccatactgttttagataccatgtgtacttctgctgtttttactctatagctttttctttctccatctattgcgtagcacctttatagccagtctgatctgttgagtacactttacagttctataatggcgttggtctgagagataggccttccttaagtattcccaaggcctgtgtctaattccagcccagtgaagatgaacttaaaatctgatgatacctgtagtaggaga

SEQ ID NO: 35109 - DNA, 1237 bp, Mus musculus
cccataaaaattgtttgagaaacatcaacaaaaatttcaaaagtaagccaggtagtgttggcacatacctttcatcctggcactcaggcagagacaggcagatttctgtttgaggtagtgtgcaaagccagtttcagacacgtgtcctgctgacaaaactcttagatttaggtacctatcaaaaggaaagtagttgagagcctgttaggaattgggtttgacagtccatttaagaaggaataaggctgtttccgtgctgtgaatgccactaatgaccaacacgcagctttagaggggaagcattggtgcctcagaacgctttgcttacatactcttgcagcgtaaatgtggccaatgtattttgaacaacatagtacttaattattttatttagacaaagaacttttttccattacaaagttctacaacattaaaaaaatccaatcatattaagtttctttttgacatcatacaaaaaggctgtataagagaagtgttgttctagtagcctatgtgtttaggagatgtgaatctactgggaggaagtgaggcaggtgtgttgagttcatcttcctcttctagcaacttcagtgcttttcatatgtatggtcagtttggcattattgcttggaatagctttttaaaaagatactttattctccccatgaaatagtaagaaggtttccttttttttttttttttttttttttttaattcgttgcctaatttctaagtataatttcttcagctgttcaggctgtttgcaaaagacaataatatgaagaaccattatgttcccccacccttgaaagctaatgcaagcagctacatgtatattatcacaccaaaattttgttgaattaaataaatacattgtttaagtggtttatttttctacacgagcaattaggtaagtatgttatttcaggtggaagacttggagcctgtaggcggaacaatggtaagcttttgttaggagggaagacttcatggaagaacatgagtaagtaggtaaatagctagggtggtatggttcatctttgtaaataaaggagaccaacaaacatttgaaaccaagggcaggaagtaagtggaggggcaaaacatacctgtagtttgtagaattgtgtatgttaatttcatgtttatacctctttcaatttcaatgaaaaacattttgaatgggaagtttttctttgcagtgtcatatataacaaaacagtatactaaaaactaa

SEQ ID NO: 35110 - DNA, 1616 bp, Mus musculus
cccttgtagagcagagacagcagtagacctggcagatggagaggaaagaagctgaagtgacatagtcatttcaagtttcattcccaacagcacttagaacaatagtgtctggtgagctcaggagtgccgtggtaaagggcagccgagggagatctgaggaggtctgtcatacacttcacctgtgtgttcaatcttattaaatcagtttaccagtaatagcatggttagtatgaatttccacatttaaaaaaacctgaatagaactttagtgaaaactaagtttgtcatccaaaggtctcttagcactttttgataaaatcttgtttaccaatatgaaattattataatactaattgctatgttcatcagacttttccaactttcattagtactaaaagtcctcatcacctgaatatttcttttagtaaacttaaaggaagagatttaaaaccatgcattttttaaaaatacctttaaactgcctatcaactgttactgttaatgaagactttgtttttactatgatcctggtgataaagcatgcttagagtgctaaattggcctgttgagaacttggatgaatataaaaattaagtttggatttaatataacattccaatctgtcagaagcatgcaaacagaattttagaatctgtgcacctccatacaagtgttagcctgccaggctgtcagcttacctttattaaactttcagtgaaagtgaaattatgaaaatataagtttatatttgtgcttttagtcagtgtataagctgtgcagaaccccacctcagcccccatgaactagttgtataaagtagaaatctgttattgaagctcttaaatagctactatgcttttaatattatttcaatgatttttagcaatagacccataaaaatggtctggaaaccaaaccaaagtatggtagaatgtaggcaaaaagaattgacctaaaaacatgcctccgcatgtactcaactatgttaagggacttccttaattgtaaaagttgaaacttcaaatgggaccctaaagcatatgtttaaaaacaaaaaaaaaaaagtttgtggaaattagcctaatttatcagctattaagttgatttttagatatagaaatgaatataacaaacaatttcattttaagtactaataaaattttattttaaatgctgcatttttaattcttaagatgtactttgaattcttaaactgtctaattgaatgttaaacgttttcaaggcctgttaaaattctgttgtatatagtagtttttgagcagatatttgcaataaaaacctgtctttgaataattttatattcagattcctgtttggctagcctgtctttgttgctgtcgtgtgcattgtaggcagtagttcttgtacactataagctccattctgtgtgctttactaacagactgaactgaaaacacaagggacacactgctaatacttacacagtaattctttcacattaagagaaagaatagtattgtacatttattttccttatcaatttaaagaggttgagtaggaaaaacacataattgttttcttgaacatttaaagagagctggttttttttcatctttcctgcttccaatacaagt

SEQ ID NO: 35111 - DNA, 1190 bp, Mus musculus
ttttaagtcatttcaaattaagaatccataataagaatgattatgtagtcattaagtgcaccacaatgaaaccatgtatttctttctaataagcaatgagcaaaggaaagatacttgcaaactgaacgataattttaaaaatatgtgggcacagcagaggttagtggaaagtattatctttgcagttttagaaaggagtagttaaaagccggtaatcttgtgtttacacatatatttataatagctaaaacatgagagtagccttcatatccatcagctgatggaatgtaaacaagatgcagtatgtgagcctttagtggtactaaggagtactcaagaatactctatgaatagatgacacatgtggacctttgtcccctgggaacagctgtgggacacatttgtgagagcttagattaactgtgctggcagcttctccacagtcaggggagagttggtgacagcaagaagcagacctctctacccactccccaccaactggaaagtcactgatgggtgatcactcctctgtccttcccagggaaggtcctgagaacacagcttcagtgagcactgtgtaaccatctttccaacttgccctgggttgggtttcttctttcctgatacattctgttctcaacagagactctggaaagttactggggtccgagtgactgtacagcaaatgatttaaaggtttcaagaccaggttttggaacacaggaaagggcagaaatttggtagcccgcactgctggtgactagtctattccttatgcggacccagcagggggtgtatggacattttcacattaaagcaattctttggccaaacattctcctgccttttgttctttgcaagatgtcttcactactgaattgaacaaaaaattgaaaaaaaaaatgtgtgctgatgccataaactcgaggcattcagactaaatgtcacaaactaaactgttctccaagcccttgatgtctgtgcaattatttggcaagtaagtacaaaatatgcagtataaaacatcatgtacccagaacataaaacaaaatatatgtctttgagtagcttgattagtttcaggagggaatgcgagaggcacatgcccatggaggaagtgagaggctggtgcggctgttaagattttagatgcatgaacagtggcttcccagagcttgggggcgggggga

SEQ ID NO: 35112 - DNA, 1146 bp, Mus musculus
ttgaggcttggcaccatgaggagaacctatgagaagctattgatgaagcctaattgtagcagaagactccagtgtaatgaagatgccactaccatggaatgaccaccaagaacagcagcagcagtggaagagtcagccagagcctagagtgctacggagggcaaagctccttcctttgaaggagcccaaaggactatgtgtggatcccaaacactggaacaagaagctgtaacactgaagttgtcttggagacctcaagatgatcgagatgccagagccatgggatatctgctaaggaacgctgctaacagggagtggaaccaacccaggagaaagaactttgttgcagtcaagaaagatgaaaaaggagttggaaatctgaagactgctttgacaacagatatggacatgcagagaatggagtttgcccagctggttttctgtcttgctttggagattacagttaagtgattgtagaatcttaggagactgaattttgaactttcaacattgttgagactgttatagactatggaactttggaaggtggactaactgtattttgcattttttttttttttgaaacagggtttctctgtgtagccctggctgtcctggagctcagtctgtggaccaatctggcctcgaactcagaaatctgcctgcctctgcctcccaaggcctgggatcaaagccgtacgccaccactgcccagcgcatttttctatggctaggtacaacctctatagattcatgtgtttgaacatgcccatgggagccaggtttgaatatagttggcccagggaatggcactattaggaggtgtgaccttgttggactaagtgtggctttgttggaggaagtgtgttgtcatcggcgtgggctttaattaagaccctcatcctagctgcctagaactcagtcttctgtttgcctttgtaacaagatgtagaactctcagctcctccaacaccattcctgcctggtctctgccatgctccagccttgatgataatgaactgaacctctgaacctgtaagccagccccaattaaatgttgtccttataagaattgccttggtcatggtgtctgttcacagcagtaaaactccagctaagacagtgataaataacaactttataaaa

SEQ ID NO: 35113 - DNA, 1149 bp, Mus musculus
tgttagagggagggtttgtacaatttaaggaactgtctaaggcagtccagggggcagttacttgatcctagagttaaccttcctataaatcgcagttacgtgcatctgaccctccctcctgcttcatttagatgcaggcaccctcattttgatagttttactatcagaccagatgaaatggggtcatggtagcagcctcaagcaaaaataatagggactttgatagttactgatgaaaattcagatgtttctaataatgtaactacttctttgtgtattgttttcctttagtcagttctcaggtacacactactgttctttttgactgttgtgtgtcattttgtaaatgttttaaagatgcattgcgaacatctctttttggttggtttgagtttggttttgttttgtttgatttggtttaattgttgtttgagatggagtttctctgcagcgctggctgtcctggaactctctctgtaaaacatgctggcctcaaacttagaaatgtagatccctgtctttgcctcccaagtgttggaattaaaggccagttccaccaccacctagccttgtgaacaccttaatcttacttttcctatttcagcctttccataatactttaacatatttccttgtaaaatttatttgtatactttagcctttttttttttttttttttttttgatctttgaatcgtttttattttgaatctgtttttggcttcaggtgatttttaaaacttgaataggtatccattcccagcaccattcattgagaatcctctagcttatcaaaatttgtaatgtacaggtctttttatagactcttcctctccccatcagtgtcttgtgtactatcactttatatgaaatctggaaaatagttctataaacaactcattgtttatgtcatttccattcaagttttagaattactttgtcaatttctatttttagaaaaaaattattgatattttttattgggacttcagtgactatgtcacagtcttcctctatgagatagggtttttcactattatagttgattcttccatattttctctcaatatatctttgtagttttctctgtaaatttcatacagattttcttaaaactattcctaaacattaaaatttttaaagtttagat

SEQ ID NO: 35114 - DNA, 1138 bp, Mus musculus
aaaactcacaagggtcacaattattatctagcattagtgcttaaaatactgaagctttgtagtaattcactaacaatgagcagaccatttttacaatgtgctttctcgtttatctcactagcatatgctgatcataaagcagtagcttttcttattcataaatatattcataattgaatatgacattgtggtaatgcttaccccctctgttgctttctctgatcctcctccctttaatccttttccctttcaatgtacctaattgtcctgcttttatttttatgccacctgaaatgcctgtatgaaagaaaatatgtggtatattctgatattggctattttgtttccatctattttctgacaagataattttcattgtagctgaataaaactgttgtatatcagtatcacattttgtttatcctttatcaatcaatcagcagtttaggctgctcttacaacattagtatttcaaacatatacagatactttttccatcttttattgattattttatttatttacatttcaaatgttatcccccttcccatttcccttctccaactctccatcctctaccctcttaccccgctaccaagatacttttattgtatatgctgctgaaggaatgtcaaagataataaaagttagtgtgacatagtaatgtatgcctacctgatctttctctctactttgtgattttttttttataactttagatttttaaaaacaaaattgggtactaaactatactagaaaggtccccatctggcttcatcttattttttaggattcttcctcacaaaagaattaattagaacaaaacggataaaagcttcatcttggttgatggtaaaagtataacctgatactagaaagcattattaaatctatccataaatgcaaactaattatccataagctgaacttgtttctgattgacagctaggacccaaagcagagaagcaatcagaatagtgttgcaagctttaaatcaagttgagttattaacaggaggttttgcttatttgtttcactgtgtatatattgtttaaaatttataggaagagattatcagagctggggggggggttgttgttgttgttttgttttttatttttttacagtccagtcatta

SEQ ID NO: 35115 - DNA, 1152 bp, Mus musculus
gccattttttcagccccttttatcacctggttattatccaatcatctttgctttaacagtaaaagtggagaaagatgttagcttatcttgtttccctcctgtaattcaaaaacatgggaatctccctggttaaaaaataattataatgttaataatacacttaaaaaatgttcttgtcttataatgaaagactggtgttaacttttttttttttttgcaaccattaaagcaggacatagaaaagaatagaaaaggccctttttgtatcagagaaataatatataagaaaacagaaggggatgaaaattaagaatttattacagattgacccaagtgtccaccacaggctggcccatgtggctggaagaaggacactcaagcacctgccctggccacaatggtgttggatggccagaagatagacacccagtacctgcctctggccctaccacagtggaagaatgtgtgatggagagatggaagagaaagtgaggctaaggggttcgtacattgtggggaaagtggaactagaggccatggtgaggtccttacctgagctgctacctagagcatgatactgctgtagctggagtctgtgttgagatctgtggtccaggttaccaccaaagcagatgtccatggtcgtagttgccattggggcagtgggacatgctgatctgagtggcctctgctcctgcagggagggaacatgtcagggtctgtgattttatggcagccaggggcctgtgttgatgtccaaggccgtgttaccaccaaagcccatgcaggtgctctagtttagactgatacttgagacactgtgctgaactggccctacccctcaccagcagcacctagactgggcagcatagtagagctgaccctgaggacttgcaagcaggggagttgaccctgccctttgcaggatgtggcattgagtgatctaacaagggcagtgctagagagcttaccctgatggttcgggcactagagaaactggtgggctgactaactcagctaccttccaggcccagatctacagctttgagttggcccaccccaacatctactccatctatgatctactggagtccatgaaagggcaggtcctgcagatccaaagctgcaggatctctgtaacacagggtatct

SEQ ID NO: 35116 - DNA, 1131 bp, Mus musculus
tccccatctcttacacgcacgcacacacacacacacatgacattaagatttaatagaagaaatacaagcatgttaggaagttgtctcgtgttttattatttgcttgctgagattggagtgttagaaggaaaatagaggatttttttttaagtttcttcaccaccgctccatgtacatactgaaattctactgaagaattcattattttttaatgcttttcaccatggtatcctttagtattcagcttccctcctcagtttgctgactaactcctttgcttctctgaatgtagtaatacagttctatcatggatcaaaacaccaagcaggaaagagataacgttaaaagcccagcaaaaaagcatttcttcacttgaggtctgaagcctcagatctttctatctctgataacacaaaggggatgatattagtacttgaagagaggagcattttattacatgcttgacttatttattgtgatggacacagttgcaaaagaagcaaagcactcaggatttgttttaaagtgtttctctgtggctcccattttgttttatgaatagtatttatgaatctcatgttaacacaaaactagtaggcagctccatttaagtgagtttcaaggtaattttcaaagagatgttaaagttaaccctgagttttaaaagattacatgaaaacattcactgtactctcctgactagccaagcttttcttttaccttaattcaaaaagaaattagaagactacaatctgaatatttaataaatatgatagaagggttaatttaataagggtccattgttcaacagatttgaaagtagggtattaacatattctaataaatcaatggtgctagagttggctcagaggtttatctatggatatgtcctagttactggcatatgtgtgtgtttgctgttaatttgatttaatgatttgttagttttttttcttgataatagttatttcttcactgtacattgagatacagcactactgcacaccaaagtatgtaatacccaaaggaaactgtgtgatttcttctaacaaatgatgggagcctttctcagtgagatactctgaaaaggagactttgaggccattctaatcccttgtttacattgttagc

SEQ ID NO: 35117 - DNA, 1035 bp, Mus musculus
ccgggtcctatggcgggcggcttccgatcggccaggagcacgcttttcaaatgtggctttaggttgggggctagctaaaacgcctaatctgtaggcgacaggctcgcgtggcgggctcccagggagacctgttgttcgagcaaaaccgcaaggtagtggctttgcggaagagccacgtttctcggcccttcccccactccaccccacccccgcctcctccgggggctgcggggcctccgccgccaacctcgcccgcccttccccccacccccgcgcgcgcgctgccgcccccgccgcgggccccgcgacgcgcgctccggacgagctccttgtttctggagtcccgccacgcttgctccaacccagccccccaagcctcgcgcgcagccgcagagcgggtcccgccccttctcgccgcgcgcccctgcaccccagcgcgctcccggagtgggcctcctccgccgcagcgacgcctcctcctcctcttcctctctccttctctctcggtctctcgctctctctcgccgctgcagcctagtaggggcgcttcgtccagcatgagctcggacatggcagccgacgagtcggaggccccagtactctcggaggacgaggtgcgggaaggctgcgtgccgcgcgggggttcatcgtggcgaggggtggccggggtgggtagcgggggtggcgggcgatcggggcccgaatttggccccgcgctccggagcggggcaggcggtgagggggagatggagagaggcgcgcacgaggcctctgcgggagcagattccccgcttgctcgcctcgctgctcggggccttgggcctcccccggggggcctccgggggcctttggctgcggcctgggcgcgctcgctcaccctctccgggagggccatggcttgggtggggcggcctcccgagactcagcatcccgctcctgccgcagcgggagccgacagaacttagcgactttgccactatggcttcccgagggccagggttgggaacgaaggggggtggggggagggtgggattc

SEQ ID NO: 35118 - DNA, 1185 bp, Mus musculus
cttcaattcttgccttgatttccctgtatagccccagctgtcctggaactcaaatccacctgcctctgcctcccaagtgctgggattaagtgcgccgcctggcggactgaatgtttttaagccaaatccccaaggttgctttttattggaatattttccccagtatctgaaatgaatccagaatacctacccttttttgatttaaacgatttataatctgtaggttaagagtgcgtacaacagtgtagtccacagcttggagacattacctacatttgcacagactcacatccaactttttatttgctgagccacttgagaataagttacagaatttgtgccattttctgctgaatactttgttattcatcactttagaaagtataatatttttattattttgttgagaatttcacaacaatgtatttatttttttaaattatgggtatgggagttttgcctggataagacagaagatggtggcggatcccccggaagtgatgttacagatacttgtgagcctccatgtggatgctgggagttgaatccgaattccctggaagaggagcacgtgctgttcactgctgatccgtacctggagctccacaacgtatgtttttaaattcttatttatgcgtatgggtgttttgtttgtatgtatgcctttatatggtgtgtattcctagtgtccatagagactggaagagggcctcttcagaccttagacctggacttagagatggttgtgagcccccgtgtaggtgctaggaattgaatccagatcctttggaagaacagctaatgctttaaactgctgagctatttctcaaccccccaaattaatgaatttcctttgaggcaggatctcataatagccctgactagcctggaacttgctatgtaaaccacgctggtcttgaattgttctagtgctggctccaaggggttaaagtggcttatcaccacacctagccatagacaatgtaatgtgatcatatttaccctgccaacttctccccccagctaccctcagatgatatatctcttttaagacaaggaaattctcccatgagacctcattccactgttgacatgcaagatcattggtatttgacatatcatagtgtgttcactgttatttataaactgtttaatggtacttaaaaactaccttttctttgtagt

SEQ ID NO: 35119 - DNA, 1174 bp, Mus musculus
ccagttatcccgttgtagccctgtgtcatggagatcctgcagctggatctgcagaactagccttgtcttgtgtctcagcttgtctcagatggggtgggccaatttcagaacctctggacctgggcctgtgtggtagcagagctagccaacccaccagcttcttctttacctggaccatcagtacaaactctccaggcttgctctggcatggccacccaatgctgccgttggcaggaggcagggctagctctcctgcactcatacccttagctggctcacctgtatctaggcctccagagccagttctgtgctgcccagtcaaggcatggggcccactctcccaagttctacactaaatctttggtcattctacagatgtggtaattaaagtttttaataaagtataaatttctataactgtatacagatccctggtttttagggtacaaagcaatagaaataatagaactgaaaatctgataatttgaacagttggactaaattactattagtaactactaaaacttacttgtttttaacttttaacagtgatccttacgtaagagtgacattgtatgacccgatgagtggaatccttaccagcgtgcagacaaaaactatcaaaaaggttagatttagccagctttcaaagatttttaataaactttgctttttctatgacaagtcattctaaaaaataaattatgctacgtttattgtcttttagtctttgaatccaaaatggaatgaagaaatactgttcagggtaagtattattttattaaaaattttttctttgtaggtaccattatgtagtcatttacaatatcttaaaataacactttgaaatgtgcctagagggtgttttttatgagacagggtttctctgtgtagccctggctgtcttggaactcactctgtagaccaggctggcctcgaactccgagatccgcctgcctctgcctcccaagtgctgggattaaaggagtgcgccaccactgcctggcagaaagcatggttgctgggaattgaactcaggacctctggaagagcagtcagtgctcttagcctctgagctatctctccagcccttacacgcccttcttaactcaccccacctctcatcctgtcctgctattcaagctcccagtagagtgaggggcacacttctgcc

SEQ ID NO: 35120 - DNA, 1099 bp, Mus musculus
tctgttgatgctgctgtgaatgagagcagtgaatgtgggtgtgctagcatctctgtggggtagtaacttactggatatgtactcagggttaaatttcaaactgaccagcacctgaggtgcctatttaacatatcaaagtagatctggcccagatcatgctgaagaacattcagtgttcttgacctgtgtgtcatctcctgtccagatctggtgaggttttttgttttgttttgttttgttttcttatttttttcaagacagggtttctttgtagcactggctattctggaactcattttgtagaccagggtggcctggaactcagaaatcctcctgcctctgcctcccaagggctgggattaaaggtgtgtgccaccatgctcggcttttgttgagtttttaatttccaacatttctctttctcaaaaatatgaattttctcactagatttctatttcactcacagtgctggattgatttctcatctgttgaaatagatagtgtggtgcgggatggaagtgtgcgggatggatagtgtgatgcgggacgcagctggaagttcttcacccatagtgtacacgtgcatgatgaggatcagggactttaaagatacaaaccatcaaagcttacttaagcagaaataggttgtccaaatagtcccgtcttataaagaaattgaatattgaagttaaaaacatttagccaagaagaatttgatcccagtattcctacttttgaattatgtcatacattctacacaatgttatatgaaaaaataaaaaaggagggatcatgtagcaatttgtttgtaaaaccagaagtactctcttaaaaaaaccaagtgtagactgtgagagaatagaactgaacatcattagtattctagttttgtttctgttcttttttttttttaagatttttatttattattatatgtaagtacactgtagctgtcttcagacacaccagaagagggagtcagatcttgttacggatggttgtgagccaccatgtggttgctgggatttgaactctggaccttcggaagagcagtcgggtgctcttacccactgagccatctcaccagcccgtttctgtt

SEQ ID NO: 35121 - DNA, 1099 bp, Mus musculus
gtggcattatctcctgcgaaggagatcttagattgtgttaagtgtaagtcttcacagttgcatagcacgtactgtagccaggaaaccccatctgaaatatataaatatatatatataatcttcaacctctggtatattaaaaaatggtttcttttatgtttagtaataagtagatttttttttttggtttttgtttttttgtttttcaagacaggggttctctgtataaccctggctgtcctggaactcactctgtagaccaggctggcctcgaactcagaaatctgcctgcctctgcctcccaagttctgggattaaaggcgtgtgccaccacgcccggcccagtaaattttaactattgaaatatttctgcaaaaatgggagacattagctttgaaaaataccacatatcatttcaacaacaaaaagtgttggaataagtgtgactgtgggtaacgtgagtcttgcctattctttgtgcaattgaactgcttacctgggtcagtaagttgctcattttgaagatgtttcttggcatctacaggtgaatggatattcgtgtttttaaagaaagcttgttttcttttatgtaggtccttccacagcgacaccgcattcttttcgaagtgtttgatgaaaatcgtttggtaagttctgtcacactgcatgagtgtgtaggttgcattgatggtgaacttcaggagagtggtggcagttgggtcaggaacctgagatctgagactgatctgagagacttctgagctactaatggggctatggtatttttctttctcctttcctggagttaaccctcccattccattctgttctgaaggacctgtcctgcttgttaagactgtaaagtctctctcaacgcctatgtgacagaaggtggggaagggaagccgtttttcctcgttttccatgccgtgtactctgaatctgcagttgtgtgtactgtgtgtctgctacagtgcaccacctaccgggtgtgtgtgtgtgtgtgtgtgtgtgtgtgtgtgtgtgtgtgtgtgtgtgtgtgtgtgtgtgtgtggtgtgtgtgtgtggtgtgtgtgtgtggtgtgtgtgtgtggtgtgt

SEQ ID NO: 35122 - DNA, 1275 bp, Mus musculus
tttctcagctggtaagaggaactgtagttgaggacttgtcttcatatgtgcctgtggacatgtccgatgggcattttctaggttgatcattaatgtgagagggtacaacatactgttggcagtggcaaccctgggcaagtggtcctgggttgtatgaggaccagattcttgcccttggtgatgactggagcctgtaaaagaaaatcgccttttccttcctgggttgctcttggtcagggttttatcatagcataagaatcaagctagcacagtgatgaactaaatatcagctcttaacacatttgcatgagatttctacttccaatgtacattttcttctgccctagtttcccagaccaaagtgttgacagtgtgattagctttggtcagaacccatgaattcaatctagggatgagtaagcacagactctttgattatgattctaactgtaacaaggcaggggtgacgccttcttacacttctgccctagcgatgacctcacggatgaagacaatgatgatatgcagctgcaagcgcagcgagcattcaccaccaggcggcagatatcggaggatgtggatggccctgacaaccgggagtcccctgaggtatgaacccttccttctcttgttcccgtgtccggcacatgttatgcagtggatgagtgtggactctgctcttttcagaattgggaaatcgtacgagaagatgaaaacaccgagtatagtggtcaggctgtccagtcacctccatcgggtcacattgatgtgcagactcaccttgcagaagagtttaataccagacttgctgtgtgtggaaatccagccaccagccagccggttaccagctcagtaagatgatttagatcttgtcatgaatttgtgataccttgtcatacattgatgtaacagcgtatgttttatgtagacttttgtcttcagtgacatgccatagtaacatgttgggggctttcacttacccttccactaactccgtggagcagagcgtggatagttctaatggaccctgtgttctcgggtccttcacccactgccaccagaaacacggaagccacaagctgtggttcttggtcgtttcacacaaagaatcatggactggcagtgagagggtgccagcgaggacggtggatttgattccttggggaattttaaaagaggttgggggagacaggagactactctagatgttgtcaggaagtggaaagaattgtgtttgaataactcagatctcctcctgtgaggacacaactcgat

SEQ ID NO: 35123 - DNA, 1164 bp, Mus musculus
aagagatggggggccgaggctcaggagagtgtcttatctgtcttagaaaaggattctttccagtcctgtgctgagttcacctgactctgaagaccactggcctagtcatcatgacagtagatcgtaggggtcaagaagggactcccctgttatcttgttccggtgtccataccctggcttgtctggcctccttttagaccacagcatgtgcaagcaaaagccgaatctcactacagtcctggagctcacttggtagatcaggctggcctcagactcacagatccaccttcctctgccgcccagcaccaagtgaattgctatgttttaaaaatatgttttaaaatatgatttaaaatgtggttcattgttctaaattttaaaacaagagttgtttcagagcaccagcagtgaagaaaggcaggaggcttctgtcagaaattcctcctggttaacactgaggggtttttttgtgtctgtgcatattagcttttgcctacttcatctggattgccaccaggttgggaagaaaaacaagatgacagaggaagatcatactatgtagaccacaactctaaaaccaccacatggtccaagcccaccatgcaggtactctgaactcttagcttgtctttggtaagctcagacctcacacttctagagcaagagcagagtgatgacctgctccttcagtgattgtgttgtttagttttggcatgcatgcctctgtgtgtgtgtgtgtgtgtgtgtgtgtgtgcgtgtgcgtgtgtgtgtgcgtgtgtgtgtgtgcgcgcacgcgtgtgtgtgtgtgtgtgtgtgtgtgcgtgcgcacatgtatgtgtatgtacaagtgggtatgtacacgtgtggggttgtgtggggggtgcgtatgaaagactcatgtggaagcctagagttgacactgtgaattcctcaattgctcttcatgttattatgtatttagtcagggactttggctgaatttggagttttctctaggatttggtctctagctctcaggcagtgggaccatagactggccgccatgcctgagtggctttctgtgtgtgtgctgtcgatctgtactgtgctctttacactaatgacaagcattgtatccactgagccagctccctgggcacttcttcagatagtttgctaagctaa

SEQ ID NO: 35124 - DNA, 1192 bp, Mus musculus
acaagggtttcacagagagactcgatctcaagttaaaaaaaaaaaaaaaccacaagctttttaaaataagggagcttgggcctggttgtgcacacctttaatcccagcactcaggaggcagaggcaggcggatttctgagttcgaagccagcctggtctacaaagtgagttccaggacagtcagggctatacagagaaaccctgtctcaaaaaaaaaaaaaaaaaaaaagaaatcataccacttccacactggatatggggatgcataacaataagtccagactgggtgggttgggagtgggctttgagggtttctaggctacccggagcaagtgaatggcaatcctggatgacaaaaatggaccctgtttcttaaagcagggtggggaaagaaagttcagtacacctaagtggggttgtcctggtggccttacttaaagggaaagggtatcggtgcctggtgaagtgtgggaaacacactgggctattttaaacatgtctctctccctggctctgcagactgacattccaaacaaatttgaaatgaagcttcgccgcgcaaacattctggaggattcttaccggaggattatgggtgtgaagagagctgacttgctcaaggccagactctggattgagtttgatggtgaaaagggccttgactatggaggggttgccagagagtggttcttcctcatctcgaaggaaatgttcaacccttactacggcctgtttgaatattctgctacgtaagttcctgctgcctcagcctcctcatttgctaagactcagccacacgtccttacactgttcataaatactttaaatggctgtgcactaaattatagtctccaaaactaggttacatgttagaaagcatgggctacgtgatcggggccacaaggagatatttcagaaatagctttttaaagattgttttataggacctgaaaattgtatataatgtacatagaaattaccattttaaccttgtgtgtgtgttgtggattgcacgtggtaggcaggccgtcctccacagaatgcccacctcacagacctctgtaagcacacacttggctggcgtttcaagtgcttcctgtattgttgatctctgtacctttcccatcctcctgaataattctacattcattaaacacttttcccaccatatacaggcagccaccagtctgct

SEQ ID NO: 35125 - DNA, 1122 bp, Mus musculus
atctcagttctcttaggacaagcacaccctagttctccccgattctgctcagcttttgccttgggcccagctccagtctctctgtttctttttttttttggtttttcgatacagggtttctctgtatagtcttggctgtcctggaactcactttgtataccaggctggcctcaaactcagaaatccgcctgcctctgcctcccgagtgctgggattaaaggcatgcgccaccatgcccggctgtctgtttcttttttgttgttgtttttttcaagacagggtttctctgtgtagccctggctgtcctggaaatcactttgtataccaggctggccttgaactcagaaatctgcctgcctctgcctcccaagtgctgggattaaaggcgtgcaccaccatgcccggccagtctgtctgtttctaagtggtataaacatgtcctaaaattgtttcttggtttgtattgggggggaaatggaaagaaatgttttgttttgtttttcctccttttagccttgtaatacaatggcgatttgtgaaccgtatccagaagcaaatggcagcttttaaagaggtaggtacacagcactcttgctcaccatacccagacttccaagacccacacatctgagagggtaagatgtggtgggctctgtaaagtctttctcaatatgtttctagtttgattttatgtttttaaaataatatacatatgcactcatggagatcagtaaagaaccccctggagtgtacaagttgggtcccaattctttcttctagtcccatgctcccagaaataagactcagacccaagtcttacaagtaccctggccatatagctaggttcttctctgactaggatcataacttatagataacacatttatttcaatctttattctgccatgtagctggttacctctgctcaggtgctatatgtcagtctcactatatattcctgggcaaatcttcctgctctgactgtcttcaagaattcttagaatcttagtgggaagtggttagggaggctcaaagcgggattaagctggggactagaggaactcagagaaaaagccatgagcaagcagctgtgccagtgagaacgagagtcttcagtcctcc

SEQ ID NO: 35126 - DNA, 1058 bp, Mus musculus
aaatacaaagtgtttaccagaccgttacagtgctgaccttggctgtgtctgcagcagggcaggtggcagtgtggtggaggggcagttggcgtacaaatgactgaatttagctttgcacactctgtgtacttgtctgtgaaaggaagaagtgagaggtgactttgtgcaggcttcagtgggtgaaggagaggagcagggagctgaggacactgcagaagcctctgaggccttgctgaggggtcttccctcctgcagtgggcgtggccagggtggggggaggaattttgtctgactcagtctcctcagtactgtgaacaagggagggagagggacaaaggaggctgttaccagccactttaagaaataaagaacagccatattgaaatgcagtgtgtagcggcaaagtctgtagaagtgaacgcgctcccctttaccagacgctggagcatagctgtgcctgctcactagcttccgacgcgtttcctttccttctagggattttttgaactgataccacaggatctcatcaagatatttgatgaaaatgagctagaggtaagaactatttctgcatgtgcttgggaatgtagttaatgagcgctgcaggccatgagttcagtccttagcaccactggtgtggggtagaggggatggccatttgtggaagggatgagggaggggcttccttagcgtgtgaagccctgggccccgtcctcagacaccgtagaacgggtgtggtggtgcacacctgttacccagctctttggaggtggaagcaagaagaccaatagttcttgtcatccagagctacactgtttgaagctaacctgggctacagggaccctgtctttaaaaagagaactggagggctgacaagatggctcagtgggaaaagtagaccgccaagcctgacagcctgaatttggctcctggagtggacatggacccccaatgagttgtcctctaactttctcactcagaacatgacatacacatgctgatgttgccatacatacatacatacatacatacatacagtttgatagatagatagatag

SEQ ID NO: 35127 - DNA, 2803 bp, Mus musculus
gtgggactatggttaccatggtgacatttcctccctctctgtcactctaaccagatcctctcaatcttttcagcttcaatcgcctggacctgccaccctacgaatcctttgacgaactctgggataaacttcagatggcaattgagaacacacagggctttgatggcgttgattagattacaaaaaaaaacaagctgtggtgtcttgtacaccatagtttctaagcaaaagcaaaaacaaaatcacattttaacattttccagatagtttctaaaagatggtcactggctcttcccaccgagaccagaggacagtttatccatgatttagccaccaccatgctgacctgttcacttgtccagttactttgtccagttgttggggttcatgtgtacggcaggatgtgagtcctgtacgcctgagttctgaccctatctcatcttgctaggcacatccttctgaaactactgagattccaactgtgaaatatctgtaatgagtagctggtgggaaaaatttgatgctttttaaagatgaaatttggacaaagaaagtctttaatgattagtatactgcgacatacttagtaccacatgtcgctacttattctgtagacctgcctagtgtaccttatcgcctagaaccttgaagccgctttggaagatgtatcacacgtgtttttagtcacttaagtcactagtgtttaaaaaaaaaatgtactcttcacttgggaagtatttcacgtttgttagcatgcagcttgagccttacaggcgattctggagacaagtggagcaagcttttattgcagtgtgtagtgagtcttaggcctcctttttgcctgtgcatcctaaggctagagtcattatgtgttagtgcgttagaattccttcaaacacgaaacaagctccacaacgcagtgtttctaagcatgccgtgaagaaccgagttccatgtatgacttgcccttaccagccactcttcacgcttgcagtcacgtagtacatacgtgtttacggagttcattatgtttacagattaagcgaatttctgtagttgcatttttatatttttagtatcacgttagtataaaaatttgtttaaaataaccaaagagtagttcaatgcataatttgtatgaatttgttaccaagtttcttatgctttctaaaaaaatactgtttcctatgaaaattatgtttaatcaaaagtcaagaacccttggggcaaaatgctacaggtggagtcccaccatagtcacctttgaggcacaggaagaggttccatgcatgaatctgcacacatgagcagtgctggctgctgtgcaccgggcccttgggatgaagccatcagcactgacatccagccccgtcttcatcctcaggcttagaaacaagtgggatggtgactttacagtcagtgggaagtaagagcccgcagaataacaaaggcagaaggacaggaaagcgaggtccgagtccgactgcgaggtcatatctgccaaggctccttctagtcagcttacactggtgattatacggaaaatgctcttagatatgagaaaagcaatgtggcatgtaatgagttagtgtaagcttgtgttataaactttccgaatgcttataagtagcctgtgggagctgtaagaaatacttggggccattgatttaagcttgttggctctaacatgactaatacctgtcagcccatggtagggatttcagtgacagtagtggaaacgctttccacagaccacaccactatgttgatcggtgaaagacacccccaggccagtgcatgcttccagagtgtcctgatcagtcagccaggcatggccaccgtccagtgttgatttttatcattagccagctgagcctgcagcacggggctcatttccccgtctggcagatgtggatagctgggcccactcattctgtctctcaaggctatggtaagttcttaaaggggtacttttctgcaagccaccagagtctgagtcagctgtcccctcccagtaagcatgttcacctaaagtgatttagcctaggcgaggaggatccctactacgtgctggattatgtgtgtgttcatgtaaggatttcagcgtcaaaagttcacttcctccatagtggcaaaataacactaatatgggctggtgtgttatctggagtgcccccattgtgtggaactaagggtgaaaacagaactgtacacggttgttcagtgtcgtccccagaactcatccccagcagggcttagaaaacacgagcttccttcctccttcacactcattttcctttggatgattcagtgacatcacagaacctggtgtccccctccctaccccaggtgtgtagtaatggtccgaagggaccctggctggaacaccacagccccccatgctagtgcatgaaaacatctcgttcatattctaccactggggcattgtggagtcacattcacgaaacacgaagaccttgtacttctctagaaaagtgttttagcctactttttctctaatccccaccccaacaaatgaaacacaaaattgcattacaaaagcaaacccaaatggtatttgttttcgattttatttataccgctcgagttattccttatacgtatcaagttaaactcaattggttttaatgataagctatttgacattgtttttaaattttttcttatatggtaaatgtatatccagattaaggtatcgaaatttattgcataaactataaaatcattttcaaaatctcaattccacaaataaagttctattctgattttaaaaacaaagctg

SEQ ID NO: 35128 - DNA, 1144 bp, Mus musculus
ttgaacctagacttcactgttaagggctggtgtatctggctagcttgctctgtggatttcacctctgccttcttagcactgaaattacagatgtgacaccatgcccacctggcagtgatgtggattctaggaatctgacctctggtcttcaggattgatcagcaagcactttacctattgaatcatcaccccagtccatacctccctgtactttccttaaatgatactgcgcactctcgtgtgtgtgtgtgtgtgtgtgtgtgtgtgtatgtgtgtgtgtgtgctcacatgtgtgtgtgcatgctagggcgtgttcaagaaggtcagaggacaactttgtggagcaggttttccccttcccccttccatgggtttcagggtggaacttgggtcatctggggtttgagtgattgtgtgcactgagccataggcccctccctgtgattttctcacttcctccacttagttttattgagtcgtgtgctttttcttgtccccaagtctttccttaaattttagttaagacaaactttgtcatggagtcaggttccatgggctagtggtcctgggttctataagaaagcaggctgagcaaaccaggggaagcaagccagtaagcagcaccctccatggcctctgcatcagcccctgcctccatgttcttgctctgtttgagttcctgtcctgccttcctctagtaatgaacagcaatgtagacatgtaagccaaataaaccctttcctccccaacttgattttggtcatagtgtttcactgaagcagtagaaaccctaattaaacaggaacatacatgcatttctggccagcaggataaattttgtttaatgtatgcttttgtttatggtattaaagagacaattttcattttagcatcttatgctccttcagataattattatatatgcattacgttatttcttgtatgtaatctaaagatagatgatagatagatccctatgtagactatatataacgatatagaataaatgggtgaatggatagattcattggtcaatagatgagtatattttagtgaagacagaactgaaagaaattgtatgctaggccatgttttgtgtgtttgttgtgtatcttttaaatgcttctagtgtctgttatgagct

SEQ ID NO: 35129 - DNA, 1155 bp, Mus musculus
atcagcagcacgccccccacctcgaatcccctcgctggtggcgattctgatggggatgctgcaccgaagaagcacggagaccctgcgcagcccttgccagctgagcagacctcagctccgcagacatctgcggggctgcgatatgctgccgagggttttccggtctagacagccacgctcagggattcacaacaagcacctgttcgaaggacaatgagcagggagccaaagccttttgtgaaaatcttgatgtcttactgtttattgtttgttttgtttgtttgttttttatctttttttttaaactatttttaagcttacgaattttgaatgtttcaactgtcaacaatgtgaaaaagggcagtcaagatgcttgactggactctaagataaatcactggagcggagggaagactgcctaagccctctgctgaatagctacctcagtttgctgtgggcagactctgaagacaactgtgctgccttcttcgagtgctggtttctctcagtggcataaccagcgggacttgctagtgacgctgtgtgtccattgtgtgtgtgctgtgtgtgactgaaggagtccgataggtaggagaggaaagatgttgatctgaagctctgattttttttttttttttttaaagaaccgtgataatgtaacacctctggctgtgaggagaaaatatgggagtatatttatttgaatggaagaaacaaatacgtctctttggagaagagaacattccatagtacataggggatcgtgtccttgcaaagctgttgggtttgggacaccagagcaggagaattttgctccagcctgcatcagcctgccctcagcctgcaaaaccacctttccctttgctccacagccggccaagggctgcgctgtcttgtggaacgttttcaaagtttacagagctagctgcaaaatacaatgtaggaaagtggattttttttttaatggttcagattttcttttttaaaatctcagtttggcttcaaatggggcaaagaagaaatgttattaaatattaagaatgaagataaacgaaacagtagagattaagacagacttgaggttttcataatagcagtgccttccattgtgagaaattttgccttatacctttttaatattcacgaagatgttta

SEQ ID NO: 35130 - DNA, 3129 bp, Mus musculus
ggacatttctggaagaacgtgctctgtttaatgataaataggcccttagttatgataggtctttagcttataattatttactagttcattttttgttcttatacagacttttctgtcaattctgttaccaaagaattttcagtagacagtaaaatttctatgataagtaccttaaatccaattcactagaaacagatatagactcgaatataaacaatttctaaccctaatctgaagggtttatattgatagttaaaattaattaggctagtgacataaactaccttaccgtcaccagagtttaaaataaattttaatttccttgccagcatatggttacaaactctttaaactgtaaggttttttttttctccagcaagtaacgaaaccttcaactctatagtattaatgtattttctaattgttgaaattacttgttggagagaaaaaaataaatattactactaatgtcatggactaaagtatttaatgttcaacagaggttttaggcttggtgaaagccagcctctctgaagtctgaagtacgaaattccaactaaagtgtgaaggttatcatgtcttcctcgaggtttcattattcatcgtattcaactccaaataagctgacatgcaaattagaaactgtttcattttccaaaaacgtatttgctggaagcggtgataacctggctgcctgtcattttttaatgtcaaatattacaatatactgctcatcggtattttcataccaaagaccattaaaatatatagtttagcctgtaagtaaagatgagcaggtttaaagtaaatttatttagaaacagatagggaatatagctttagtggcaaaaagaaaatatcaaaaggctaagtttacatagttaaaagcaatacagttatattggtatttatcagtgttttttattcgagtactttatatcagcaaattaaaaagaaattaaaaaccaaagatatttaaggttacctcagaatataggaaagtttagctgtacattgaactgttgtttgttgttttgtgttaacaaactgtctctccagaacctctcctctgtgcagacagcgtcctgaggatttatttccatggtgtctgctcactcagtctcaggtgtgtttttactacatggtgtgctgcttccatacagcctgtgagggtgataggtcggcagagagagcatcaggcttgtctgtattgtgggaacccctacatcattctaagtcgtctgcattcctatgtaaagtccttctctagatactcagacagcttgaggaaaccaaaaggtgccactgttcggacgggcagtgctttgggttcaaatacggttcctaaatcataagattttcattgcgtcgaaaagctggctttcgatctcaagtgaaaccctgttaaagtgccagggggtgagatgctcctgatgtgtttgttagaagctctcttgcctttacctcagacacgagcaatggcagcaatgcagcagagactggggtacgcactgctgtctctcttctgcaggacttctgcaaacagcataaaaaaggctcatagctgaccagtcaggagcaccgcttaagtccccgccattggaaacagtgcttcctgtcatcgaaggctggggtggttcactcctgtcatcaattgcagcagtcggaggaagggggcagcatgcattttaggaagtcagagcctgctgtaattcatggttcgattctgtacatttgcatatcatcagatgtccattttgaataccagatgtggaaaaagagtttgaactgtattgtaaagagctggtacctgaagcaaccatgtattttgcaagattttcttcctgaaaatttactacatgcatcactgataaaattgctttggtagaagtaaaaaaaaaaaaaaaaaaaaaaaaaaaaaaatcactcctgggctgtgtgagcacagagtggtgggttctggagaccaccacccatatctgtctgtctaattgtgaattttgttgacatttagaaggcaaccataggttttatgccaggttgtccatgctcaggacacaagttcacaggctatcgccatgcttctgttacaggcttatctagcagacgggtactgaattcattttcttgcaatttttctaacaaaccagcacgaacttagtgtctgtaaacagcaccgcacagtgttgaaggtctgtaggtcagaactctttctttttgaggcagtttcctgctgtaaaaccctctctgtcctggaacctgctgtatgtataaaccaggctggctttgaaccagtggggaccctgctgcctcagcctatctttaaaaaacaaaactgcttttcaatgggtttttcttatttgccctgtcctgtagtatctggtccattcccaaactaaaacccttcctgcagataagcctgaacacagatgtgcctctgcctcttagtagggcttaggagatatattaagaaaatgtgtctgtcagttactgttgttggacaaaagtttatgtctgtatgtgtaggaattttttttctatttcaaagatgtgaatttaatgaagtgtgggagccagttaagttattttctgtagtgggtgttctgggtcctgccactctctgcttccttgtaagggcaccatttcctggcttcctggtggactgtggagctgggttacattcgatttctgcttgtctcaggggaccagctctgcaggctccatctcatgaagaaagtgaatgtttgccttgattttgaatgtatttttaaaaatgtcttcttaaaacatattttttgtttaataatgtgggtttgttttcttttcctagcatgatagtaaatattgcttagtaccccacatccctaccctacccctggaagtttatattctaccctacaggtcatgccaaaaatgaataaaagtttaaatgccaaaatgtttattgaaactgctgtctacatattgattgattgcacagtttaaataaaacctttccttagttttaaaaaaacaaaaacaaaaaaccaaagacatgcgtttttcttctttggatgctagagaataaaaaacttggttgggggtggggcacccttgatccaagcactggggaggcagaggaagatagat

SEQ ID NO: 35131 - DNA, 2318 bp, Mus musculus
ttattctgtaactgtaaatgtctgtttacttttgagagtcaagttccatctttatgaataaatgcagtgtgcctataaaataatgagactgctttctgatgtctttagttcctgaagcggatgctttaatgagcaatgttggaggctgctttaaggaagcgtggataacttcttgctgttcaagagttaggtgtgcagagagaggcatgaaggtgtagtgacctcaggttgtctagagatggttagaaaatcttcatgattgaagtgaccttgcatctaaacttgctatgaaactagcttctgggagagaagtgagggttggtgcgtggatagagcagggcctccctggaacggaaggtcctttgcagaggttggagagatggagacctactttacagaaaccaggtgagctggcgtgatcaggaaggtctcccttttgccctcaagtgcctgtcttgtgagatggagaatttctgaaggatcttgtcacggggtgggatggtgcctagtcctctagatgactggcagcagccaagagggttgattggcaaggtgtgaagccagctgtggtggtctgcacatgagaaactgatgggagtttgaatgaggtcatcagaggtggtgaggagcagacaagatacattgtcaacaagtcacatagccagacacttctaccttgtgtaagggaagtagaaagtaagtggtgtaggttcacctggaatgacttcactgttggatgctgagattactcagaactccagaaggaagctctaagcaagaggaaccagaagcaacttgattttggaggtatctgttgacatttatttggagaggacgggttggtaggtacatggccatttctactcacttcgaagccagtccccattggtctagtgcaggggacaatgctatctgtgctggttagagagaaggctaagcgagaagagtgcagagtgatgcacgtgaacccagagatgtcaagtcaggtgcttagagctgagcgctgcagagcgcttgtgtgcaggtcctggcgtaaggcagtggaggagccagcaggcagagtgggaagacagcagtgcctgctcactgcacttgcctggaacgggggaaggttggagactgctctgcgagctgtgtctcttctctcattgagggataaagccgatggagacgaggctggttgttcttatgcttcctggagtgataacggaaacgcctcattattttatggttacattcctgctcctcgtcacctgtcaggcctccccttccggccagtgcgggagtattgatgtctgccctttttccttcagtgttgaaataatacccctttttcctggaattagagtaggatgttattttctgttttatctttttgcagtgttcaggtagataagtggggaaaaacattgttctttttacttttagaaaactgaactctaacatagattaaaaaaatgtgtttactactttcagtcgacctgataaaaagcaacgtatggtaactattgaaaacgccaggcaccgaaaacaagagcagaagcaccttcatccacagccttatgaaagggaaggtaaatggcaaaaatacggtcgcgctaacggaagacacacggcaaatcttgagctagaactggggcagttacctttcgatcctaagtactgatttgtgattaagttaggaagttaagagctgtggatgctatctacttggtttgatgttgagatgaactccccatgactgtctttatattatgcaaaagcaaagcttactaacttgcattttcctgtagcttaggtttgttaaaaacaaaaactttttttcctgctgggggggggtgggggaaatggtagttttattaaggaagccaggcatgaaatagtctgtgcatgaaacagggcttggtttgaggagctgagctcagctcacacaggcatttcgtgccgtgtggaggtgtgcagcagggcctgaggactgtgctgaggcgggactccgcgctaacatctctactctcacgcttttgtctctctgtgggttcaagagcccgttggtttgtgaagagctggctggcttgtcttgtgaactctcttgcacacctgaatgctatggaagaaacaataaactgcaccgtgaggaaaactaaaggtctctctcaagtctggcgccgtatttgtgttctctgagaatgcctcaggacagtgtatgggacagctgtccccagtggcttcctctcatttcacggtcacctacagtttctctcagttatgccaacgtctctgcagaagtccttacagttcagttccctcctgtgttgacc

SEQ ID NO: 35132 - DNA, 1958 bp, Mus musculus
gtgggtgaagtagggatcagtcagattgtctgctgttagccgaggggtcatgaagactcttgtgtctatccatggtctgttgggttcagtgcacctctgaacatcgctcatgcttctacagtatgtatgtttgcatgtatgtatgtatggtctcttcatatgtacgtatgtttggtctggcacctcaggatctgctttcacttgtctggagactgccaatctgacttttcccatcaagttttggtggtggtggtgtttcccagtttgttttctcccccccccccttcccccattaatgtaactgaaggaatctctttttaattaaacggcgtgtttatttgctatctggagggagggagttcactgtctgtatttaagcagtcacatttgtgggccagtttaagagaagtgttttgtagcctgtagctttcactgggaatgtggggcactgatgttttttgatagtggaaaacatactttgcatggtagtttcaagtggctttttttttttttttttgagacagggtcttttcatatagtttctagctggcccaaaactccctttgtagactaggctggcctcaaactcacagagatccacctgtctcagcaccctaagcactggggattaaaggtgtagttgtcacacctggctctcagaagacttttaaaaaattgcacatctatcatttattgccattgtcctttgacccctcctcagaaaaaaatagccatggccactaagcttttactgtttttgaaataagggactctttgaaacaccaaactcatcattgaggcctatacatctgaatcctatatacccaggacatgaggcccatcatagccgtgccttccagcgttgttctaagacttcagtggagcatactgcttgtttggcacatttcttaatgtctctcttgtaaatacatcaagtcaatatgccagacaggtattggtggttcgttcttttcatctcccatacttgagaagcagaggcaggcgatgagtttgaagctaggcttcactatagagtgagtttcaggacagccaaagatacatagtgaagtcctgtttcaaaaaacaaacacacactaggcagtggaggcccatgcctttcatcccagcactcaggaggcagaggcaggtggatttctgagttcgaggccagcctggtctacagagtgagttccaggacagccaagactacacataaaaaagtgaatgtttgcacagtggcatagtgcgggttttgagaagtgagatgccgctcctgttggctccacaccaggcacggggcttaatgtgtgtgatagttgcccaacacaagagctgccttgaattgttgaaacaaaacaaaactgagttctctgaaaatggtttaaatttgataaaaaaaaaaaaataaccgtactttttgtcactgtatttttctatttacaaatctgtataaaaaatgctctttagtgaactttgtgccaattaaaccataataataataaaaaaaaataataaaagaggtccagtatatcaagttctggtgaatatttcaaactaggaattgtgatgccaaaggaacccgaattcaggaatgcagagtccacgagatgcttgctgaggaccctggccaaaacagcatccagggaagatagctcgagatagattttttttttttggtcaattttatttcatgtatatgaatgtttgcctgtgtgtctgtgtcctttgtgtgcatgtccttggagaccagaaaaggccattggattttttgggactagaatcacagacagttgtcagctgccatgtagttgctgggaattggacataggtcctctagaagagcagccagtgcttttaacatctcttcacccccaattcaaaatgttttatccaatatttattgagtacctttgagagttggtgaactaggtagtctgatggagcaaaacaaaaatggt

SEQ ID NO: 35133 - DNA, 1111 bp, Mus musculus
agctctgaggtcagtctttgagttcactgatcttgagtttgcataggcttcctgcggtgaaacgggtacactatggcctctctgaagaggtttcagacgctcgtgcccctggatcacaaacaaggtaccttatttgaaattattggagagcccaagttgcccaagtggttccatgtcgaatgcctggaagatccaaaaagactgtacgtggaacctcggctactggaaatcatgtttggtaagtgaactggaaaggccaaggtaaccttttcctgatccctgtatacaccttgactgcagatgttcttctgtattgaaaagcctcttcagtggctgtggccctaagaaatagaagccacctcactcccaggttccccctgctccttgtccaggtaaggatggagagcacatcccacatcttgaatctatgttgcacaccctgatacatgtgaacgtgtggggccctgaaaggcgagctgagatttggatattcggaccgccgcctttccgaagggacgttgaccggatgctcactgatctggctcactattgccgcatgaaactgatggaaagtaagtaagggatgggacgggagtgggtagggctatcctgtccagcaagtcttggctccttgggagggctccaccttgggaaagtgggttttggagatgttctggaaggccagaagactgtgtttaggaacccttagctcctactccttcaggttacagggtggttgtccttatcagcctccttacactgctttcttccaactcagtagaggctctggaggctggagttgagcgtcgtcgtatggcggcccataaggctgccacccagcctgctcccgtgaaggtccgcgaggctgcccctcggcccgcttccgtgaaggtccctgagacggccacccagcctgctcccgtgaaggtccgcgaggctgcccctcagcccgctccggtgcaggaggtccgcgaggctgcccctcagcaggcttccgtgcaggaggaggtccgcgaggctgccaccgagcaggctcccgtgcaggaggtccgcgaggctgccaccgagcaggctcccgtgcaggaggtcagcgaggctgccaccgagcagg

SEQ ID NO: 35134 - DNA, 1798 bp, Mus musculus
gcaatggtgcatttgtagaatgctttgtgcattcccaagacctgggtgagtttggctagtattcctaactttttagtaatggctgctactgcggggcagtcgggatgcgttgtagaatactggactcagttctgcagagtcatgcacgagttcctgtgttttacatttttctcctatttaaatttgagtttacttttgagaatctcacacatgagcactgtatttacattgcatcttctgcatcttttaaaggcaaaggaaagcagctggaggaaaaaatggtccagcagttacaggaggatgtggacatggaggaagcttcctaacggtgctgcccgcaaccagccctgagcacgctggagtggagtggagactttcggcccctaagttattcattggttccataaggtccttcagacaagggtgattcaatgtgcttcccccttcaacgttgcagcctgtaaaagcatccccttgtgggtgttaggtctcagctcagcactctgcttcactgtgttatgcgcacgcaaacaggaaagtttgtgtgtagatgaagacatgaactgtgggcataaaatggttgagccagttgtcttcctgtgtgaaatccgaatgatgtactattttccgtgcgttgggatagtctgtttattagggttattgagatggaggtcacgcaaggaactgactgttctcatgtctacctgactttttttttgttttggtctagtatgtttagtaatttctgacagttgcataatggcagcacacaacacagcacagcttagttttgttgggccgtctgacctgcttcagccattcagcctgcagctgtgatgttggaggtgggctgggttgttaaactttgcctgaatgtccaggttgtgacatctgtccggaaagattctcctttccttcctgcccagcattgatctagaagcagaagaagaatcttggtgcctttcaaagattagggtgtggtttgttttctctccctcttcctctccctctcttccttttttttttcttttccttttcctcttttcctcttttcctttttttttttttttttttggagacatgatctctttgtgtagttctggctgtcctgaaactcactctgtgggtcagtctgcttggcactcacaaagatcccttgcctcctgagttacgggattaaaggcgtgcaccatcgtatccagtattttttttaaaaaccttaaaaagacaactaaaaagaaactcttgcttttggaaagtagaatttatggatagaatgctaactgttatttgtacataaataaagccctttctaaagtgcatgcctacatatctcttatttaaaagtcctgaacaaaagtacatgtctgtttcttagacgagagcttctacacacattgtaagtaggaggtatagttaaagggaaatatgtgtttcatacttcttggtagtttttatattatgattacattaagaatgttgagcttagccaggtggtggtggtatgcctttaattccagccctggggaggcagaggctggaggaggtctgagtttgaggcttcctgttctacaagtcgagttccaggacagctggggctactcagtgaaaccctgtggggtgtgtgtggggggtgggatggtggagaacatctagagctggagccagagttacacaataggaaccttgtctcgaaacccctcccccattttaagcgtgtatattgtcttatagggcatttagactatacatttttaggattatatttgtacaaagtaatgcttaatcttgtttttct

SEQ ID NO: 35135 - DNA, 1121 bp, Mus musculus
tccgagtgccccacccctctccaggtgctggcatttataccatctgaaaagttcccagaattccaaatgtcatcacacacagtcacaggaactctctgtagctggaaaaaccatgcccctgctagagcacgaggcaaatcatagtcagctgctgtgaagcttgcttttaccccacactgttggggaaccttctgagctccgtgcaaaatgggagactcccttcttagtggggcttccctgttctgctgctggagagtttgtgtctggggaaagtgcaccatcactgcctggcctttcactcttgatgagtaagttgaagtgtcaaggcttctagagatggagagttgtaagcataagaaagcaaacacgaataggtcagaaatgtctgctagaaactacctcaaatgctcttttgtgttctattttaaaagatttattttatatatgtatatctgtacaccaccttctgtgccagaagagggtgctgggacccctggaactagagtatagactggtggactgccatgtgggtgctgggattgaaactgggtgttctgtaggaacagcaagtgcttttaacggaaggtatcgggtgtttctgattgccattactaacgtgactaaggacactggtctgtgaggagagagcatttttcatgacatgttgtgcttttgtttgttttactgtgagtgtgtttttaaactggtagtgttgggcaccaagctttccaccttgctaacttgggcgcctgctgctttgctttgagagcagtcagtttggagaaatcgaacagaagaactgaaatgtagtcagtgaagaacatttcacataaagtacttctttcaaaaaaatttatttttgcatttgtttaaagattttttttttgcctgcatatatgcctgtgtgccacacgcacgtagtacccacagaagacagaagaggacatcagctccctggaactggggattcagacaaaccctccatctgctgggtaggcagccagtgctctaactactgagccaactctcccaggtcccctagaaaaagtgatctggtaagtattggcacgtagctttgagctctgtcctcgacagcacaggggtgtggccgggcgtgtagc

SEQ ID NO: 35136 - DNA, 1194 bp, Mus musculus
cttcttgctcacattgttctaatctcttcttgatgcttccttcatcctcagacaaaacctgcttgtccgagtctttgtgtgtctaaatcctacatgcttttttctgtaatcagaattatgtttgtttgcatgtatcagaataataaaattagtagtttaaacaaaatagaagttagtaacttttctctcttggcaaaaaaagcacaaatgaaagctagccgagggttgggagaatggctctaagttttccagtatttatgtcctttgttgctgctccaccattcttagcacctcacttcttaatgtaatatggctgctccagtttcagacatcataagctcattaaaccatggggggaaattggtgttctctccctcatgagaggctttttaaatcttacctctgatacttatctcttagtggttgtttgtttttgttttaatgtgtatggttttttgtttacatatatatctgtgaacatgtgtactcgtggtgccctggaaggccagaagagtgcatcagatcccctgttacagacagctgtgagccaccatgtgggtgctgggagttgaatccaggacctctggaccagccattgcttttaaacacccagccatctctccagtcccacaactgtttctatataacaatatttaacagtaggtataaattttttccccagagttttaaaaattgtagttaatcatagtattttctggagctactttgttatactttctggtaggctaaatagtgttctctatttctatccagacagatttctctttctttgatttgctcagcaaggtctcttatcccagcctggccttaaattcaatgtgtagtccaggatgagtttggactgtgagtattatcctactgcacctacctcctgaatatggcttccttcagtcataccccatctgtactagggttgaaacccagggcctagtgcatggtgggtggtgctctgccactgagttacatctccagccctgccagcttgttagatttgctcctgtttgttgtgtaagggttgtactttatgacttatttcccgcacctgttagctctcctgcaccaaatattctgaggctgatgataaacctacctttatagagatttttgattttatggaaacagttgaaggacgttgtgtttattctggagacttttagttaccgtcattgcatg

SEQ ID NO: 35137 - DNA, 1194 bp, Mus musculus
gaacagttgtttccagtgagctactgaaaatgcatttttaaagaaaaagtactgattatctctaaaggaagatgttaactggaaatccacccctccccccagaatcctttcgattgaccaacctggaggacacccctcgtactgttacctttaaacaacatttattctttatcagttggaaacctgagtttacatacagctgaaaggtggcagggaggagtgaaaggaaggataaaggggtgtgtcttcagctgactgcttttagtttaaatctttagtgctgcatttaagtggcatacaaaatacaatcccatatgtatgaactgttgtgaacaaggcacaaagaactgaagaaaatcactgaatacatatcatagcagctttggagccaatcatgttgatattgtcaaactggatcacaaaaataaactggcaacattaaagtaactggccaagtaacttccttctctgtgtccctacggcatagcgatgtgaaagctgctgtttgctaggccgtgtagatgcccgtttgcactgtagcttactgagcatcttaagtggctgctgtgtgctgtctcctgacctaagtgaaagtcttactaggactataaactacgcttctctttcatcagctctgtttacaagtcaaccagatcagttctaaccggattatatacagttatccacaggttcatcagcgcgagtagcagacgctggggaagtagagttagacagagtggctgttgatgtcattgctgatcgggattattacattgataagtcatctgtgtggatatcacatcatggtatagagttgtgtaaagttacttggttttagttcccaaatctgattcttgccatgcatatattcaaccttgacaagttttctttttaatttattaggtgttagtttcagtcactatctggaaaggactgtcagaatatttatgactaagatcttgaaactgtttatcctataagttattcaaaataggcatataaataaatcattataattcagggggcttaggtgttgcaacctctataaatgttctcagataccactggatactttaaaaatatcatattataaacacattaagaagacgtatgtaagaagtataggagattattaaactttatagaggatttggatcagtgagatccaggttcagtatgtcttcattatgaaat

SEQ ID NO: 35138 - DNA, 1120 bp, Mus musculus
aggctatgagaatacttcaggcctcagtatcttgtttatggtgagaaaatttttctgacaattgtaggaaaagaggaactgctgccatcctgagaattccacatggaatcagtctctctctctctccctctctctctccctctctctctctctctctctcacacacacacacacacacacacacacacacacacagtcaccagtagagagttcttcaggaggcgtggtcaagggtcctctgggtaacatcaacctgttaggatgaagagcaaatgtccgtgtgtgacgctgcatggtcctgttgaaagtagtgcagaaatagtatccataacgcatgtgcttcacgccagcaactcttcctctgttacctcacttcctcacagcgtccacaggaggcagctcccacaatcagcggggatgataagttgggacagtgctatggtcagtgactcactgggggtgacactgccctttagcagtaagggcagaagctgacctgtctctcctgatgctgtagggtgctctgggctactaagggtgctcttcatctttattggcatgtgggaagagacaaacgatgagcaccgacttactccttgggaggccagtgcactgtgcttacagcaccagctatgactaggcttgcctttgctggtgagccagtactccttgacagggtgtgcactctcaagttagaggctatctgaactagaagggcaggaagcagtgaaaacctcagatgtgaagaggcaaggcaggccactctccacaaccctgaggtttccctgggaagagcccctggctgaactacacagcctgcagagagctctctagtcttagtctgaggcacctagggacctaggacactaagtccctccctccccagggctgtctgccattggtgagtcagagtaagcttggaagtgccacagcatgctgtaggggaggagctaggagctgtgctgtgggcatgcatgcttgaggccacaagcattctgtggtaagtgctttgtagtttgttctcaggctgtgctgtgagggccgccttaacccttgccccttcccttttagagctgccttaagttcgccagaacttgtcctcagtgaggggtatcttgcc

SEQ ID NO: 35139 - DNA, 1364 bp, Mus musculus
acatatctgaaaacagctaacatttccttggcattgtgatattgtttggaatagttggggaaattttaggtttgttttttgaaggttgaaattaccgtgtataatttaatgcttggaaagtgaatacagccccgtgcattttccagagtcagtagtttcaaataacttattgttactatgtgtaataaaatcttagcctctctaagtcatgtgagacatttttcccacaaaaggtgatttctcctttaaatgtggatatgtgttgtggttgtgatttatgatccacaattatgttcttttgttggttcctgaaataacaataattttcttgtgtttttggaaagttccagttgttgcagcagtattgtacagatgggctcatggcatttaacatactgtggttttatcttaactctttagcacttattgtgaaatgcacctgcctttgaaatacagtaaatgggacgttgcagttttcgaatctttttcttccttggatctggagaaagaattttcttgacctacacagttcatctctgcacagtggttagttgaggaagcagaagtgatgaaaggtgagaggtacagccaagcctctctggaattaaactgagcccattctagagccgcacgggaggtcttctagaaggctaataattcacctcatagcaacaaaagccttggaaacatgagtttttcactgggtattacctaatgctaaaaggaaagccaaaacaatatcagaatgacattttatgctctaaatttatagctgtctaatgtgcttagtgtgtatctgtcattagtgctgtattctcctagctattgtagaaaattgttgaaataaagataaggatataaagaaacgttgtctttgtctataaacccacttcacattttaaaacaacaaaacaaattgttactttggagattaattgttataagtataatctcaggtcttagaaattgtgttagagaacagcaatatgaaaactgcaaacacttaagcaaaagcagatcagccagacagctgagcgatgtggccacttgcatatcctgggagtctctggcagaaaaacagagcctaggaactcaagacttccaaaagtttaaacaagatttgtgtccaaagttcagcttttaatgcagtaggagaagagacaaacatgcagaataggataaaagtcaaggagcgtgcgtgtgacatcctgcggccgaggaaggaacaatctgattgacatagtctcatctgtagccataatatggaaccataagtattactttctaccatagactgtcccactcacatcaggaagagttcattcatcagactcatttatcaaggagtttcctttccagggcac

SEQ ID NO: 35140 - DNA, 1147 bp, Mus musculus
gggtcccctgcatgccaggcaagcactctaccaactgagcaacaccctcagccccagatactagttgagctttccagcagccaaggaaaaggaaatactccctgtaacccccccccaaccccccccccccgcccagcagtattcttatctaggagaggaactgtgaagaactaagtccacttcacacccctgtgccatgaaacctcagttttacacccctgtcccacaaaaagcccactccaaactcttgtcccgtgacaagctcccttcacacacctgttccatgaaatctcacttcacacccctatcccaaaaaagctcacttcacactcctgtcccaagaaaagcctgcttcacgcccctgccccaactcctggcactgcaactggagagtcttagaagcctctaggtgctgtctagcaatgccttgacttggggaatgtttactttccaggattcaagaaagattttcaaatggatgtttttaagatcctagctgccatcctgcacctgggcaatgtgcaggtcaccacggtgggcaacgagaggtcttcagtcagtgtaagattcatgttcgctttgcgcttcctgggtgtgaaggtcagtggggcacagctcatggctcactggccaccacggttgagaccagccatgcttggacctgctagacagactggtttagcaggaacgaggaagaaagctttccaggggttgtcttattcccttgtcacagtacatgtgtgccatgagtgtgtgtgtgcatgagtgtgtgcatgagtgtgtgtgtgtgtgcgtgtgcgcgcgcgtatgtgcacacacgtgtgtgttgggggctctgctatatgttcttttattcaacaacatctatggagcctatcatgtgccagggatagctgtaagctctgtgaaacatcatcagaccaaacaggaagtcctgacctcacaggaggtggggtctggagaaagtaggaagtttacctaccataggctgagggtaggcagtgggtctcactcctctccacagctctcctgctctccagggtaccaggtgggctggggtctacttcttgccctcctccaactcaaaactgcccctccctccacccgtgtccaggccttgcagactttgccggtcctcagatgactg

SEQ ID NO: 35141 - DNA, 1261 bp, Mus musculus
gccttgactacagagtgagaacccatctcagagatagatagatagatagatagatagatagatagatagatagatagatagatagataaatagataaatataaataaataagagcattttatttatctattttatgccatttatcttttttctgaaatttttaaaacttgttattagccaacatagttattataatctttcatttaatttttaaatacagctatttcttttaaaactacatttatctctggggtcagaactcagtggtagagcagttggccctgggtttggccccagcaccacacatgcacacgtgtgcaacttaagtttttttttcctctttctaatcagtgttctaatatgctttttaaattttttttcacgaaaaaaaaaaaaaaaaacaacaacagaagatatggggaagctcttccttttgagaaatccacttttcccaggttttgtgagaactagttattccttccctcaaactgttttccttcccttcagagaactgagtcctctgatgagcactcctgacccagagctgagacccatcactctgtgcacccctagcaacctgaccaccctccagtctgatggtcacaggcagtagctgtgacaccacagaatggtcctctctggggcgaccggttgattgttcagtaccacctactaaacgtgtagtcatcctactgacatgatggctttccaaactgttcccaagtgctgaaaatagaactttataatacttaaataaaataaattattgagcaaattggatgcaccatttttttcctaccattgtagattacatgccttctcaccgcacagctctgtgtctctccttgagggtcagacagaaaggtgttagaattccacaagtcacagtctgtcacctgaggtatggaaaccctgctgactgtgtctggggccccctggccccctggcaggatggggttggctgagtttctgctccgtgtccactccagtcctccttcaccctgtgaggagtcactatgctaaggttctggttttctggcttgaattcatgcccactttatagcatttacctgggtcgtgcaccagtaaccttggccatcctgtaagttcctagagggctggactccatcgtattctacattttatctgtaatgctaggtggtgggatagaattggccagatcccatggcgatgacaagggttcgagtgtaggagaccttgtttggagacaggagacttgaggatagcaataagttgatac

SEQ ID NO: 35142 - DNA, 2050 bp, Mus musculus
agccagtggaggaagggaagcgtggggagagaggccgtgaggcagggcttctgagcggcggtggggagttcctcctgagcaagcagctggagtccataggcaccccgcagttccacagcccagtggggtccccactcaagtccatccaggccaccttgacaccttccgctatgaaatcttcccctcaaatccctcacaagacatacagcagcattctgaaacatctgaactaaacctcagcagacatttctctttgttcttcatgaaatgcgttgtgtctttttttatcactaatgttttaagtctttttttttttacttgaatcagaaggtgtcattaatttgcaaggatttttcttggttctcagtttgtaaaacagacttttttttctacatgtgagttagttttcatttgaactggcatgtcgtttgcacacacacacatacatacacacacgcacacacacgcaaagaatagagcaaaacaatgcagtgcaggaggagacaagatgcgctaggatgattagacattctcatagaccagtgacctgctttacgggaaacaaaaccttgccttgaaacttacacagtgagactgtacataattgcatgaaaagatctatttttttcctgaaacatttttcattcattagtattttcaagtttttcatactgtacacatttcttaagacacatgataccagcagcaactgaaaacgaatgccgaatttggtacacatgtgttatctacctcaaggtaacaaaagtatgtggcgaagcctaacccacccatagtgctccacggcatatgcacttctatctagccagcgtttatcgtagtgaactattgagactcgtccaccatttatacatgtcctggtgttcattctttatagtgaagtgttaaatacatcacatcttatttatttttagcaaatcagtatattttctgtatttaattataaaagttaacttagttttaagtttatttgcaactgcccttctttccatttggcactatggtttgttgcctgccgagctgatccgagacgtcagctcgtcctgaggctgtccatgtacgttaagtaaagtgctcactgtgtataggaatctgtattttggaggtgcttgatctatctacaaagaaaaaattaggaatttattataaaatgctcctagaagtcttaatggtgtttattttttaaaaacttgtaatgttagacttgtgtgcatggaagtaattaaggtacatcactattgtagtttaaacattgtacatgataagccttccccctccccaccccctgtttttactgtatgtttttattgaatgatctattccccatccctaggcaagcatgaataaaattaggttaaatgtagcatgtcactgctcagtcttttagagtttgttttgtctgttttattttgctgaatcctgtctgtatctttggttatcctctttgaaggaaaaagaaaaataaagatggccagcaggcacggctcctgtttgactctttagaaggaaagttcccaccgggtatgtccagtgatggtgtactctgtgcgcacacacacacacacacaccccgggatgctctggttgtgccccagcatgtatagcagatatgctgagtcaagagcttactcatccctagtgcaagtaagggtgctctgtctgtcgaagccttcatacagtcaaatgggataaacctttatgcacttcaaagctgttaaaacctggggaagctttgaaacttgcagagaaacctctatctcttcctcagtagatcacctggaggctgggcctggcccagcattcaacaggtggcagggggatcaggagtggaaggccaacctggcctccatgagcacagctgtaaaaaaaaaaaaaaaaaaaaaaacatggagggaagccaagggtttctttcttcctgggaaacttgctcctgaaatcatttaataatgtcaacttagcatcaggagtagctggactttcattaaagattagacattttaaagccgtctaaggaggaggacagataactact

SEQ ID NO: 35143 - DNA, 2278 bp, Mus musculus
gtgctcgggtttctggccagctgttgtgtaagcaccggtgtcagaaggtgtatagctcttgctcaggagccacttgattttcaagtaaatgacagtgacaggtgaccaagcattctaataacagtcaacatgagtgagaaatcctcaattcgttttgatgaaattttatctgtattatacagaagtttgttacaagcatgttaacattttataaccaaatatggatgagtaaccgactttctcccccacagtgcgcaagaggcgaattgaaggagaccaccagtaagcgcagtgacctttggaagcctgcagatcaccagaggctcgtgttggtggcagcagatgtaaaaattacctgggtagaagggaaagactggaaatcttttttaactatatgcattattttcctagcttattatatttgatttgtaaaatcagtactaggtagtattttgtatttgtagcatttctactgagaccagtttaatttagcttaattgaatggtttatgatgatttttaggtaaaaatgcagttgtggaaagtttcagaagtcgtgtatgtaagaataatttgaatgaacatcttgaggaccaatattttttaaatcaaaagggacattgctgactcaatattaatgttgctccttatacattaagggtaaggtgcatggtggtttccttttttaaaaatccatgaatttaggcaaaagtatgctttttccttattagggaaataaaatgtcggaattttgaaaggtggctcagaatccattatatctacataagccaaagtaggcctgcaggggacacaacagccatctgtgtgcaggtttctgcacacatctaatgagtctcagctgcacggggctgggtgtgtatgtctcctatagtccttagctctgtcccactgcataccttgttaaacgtatagttataagtatttttctctgctgtgggcattacagttttgtaaaagctaatggataaaaagcatccgagtagagaggttcttttccccataaaaggctcttggccaatactcagttattgagagtaaaacagaaaaaagaaaggcgctgttagatgtaggagagttcaaacctgaaatttgcaaggtggccatctcacggatgagcagtgtccgtcaggaactgacgtgagctagctatggtgggtcactcctacagtctgagcagctgagaaggtaggattgccagacattcaaagtcagtctgaactacataggaacctccaggttagcctgggctacatatgtgagaacctatgtcaggaaaaggaaagaacaaacttgttgtctgatgaggagcgctatatgtgattccataggtgcaatgtagtactgcctaaacagttaatcccctccaccgtgttccagccaatcacaaagactgctgttcttcagaaacctcattttagtagatgtttccttcatcttgttttttttttaactgcatataataaaaagtaatttctgtatcataggttatctctatcaccttagcgttagttagaatgagggtttgatctgtacagtggggttgggtgaggctgcccaccgatgccctgctagaggactttcgtctgtatctatgctctgccccatgcagctcctacaggagtggcagaggcacacacagcagacagtggagaggaagaaggcccagggaagcacgaacaagtcgacggttgcttaaaccatgccagtgctggcctgtgaagtattatacaactgaagaaaagacttcatcagtaacgagagtgtgaagtcatctgattgaatagatatcttttaagaattataatggagaacagtgtttaccttgatctttacaagtctggcacctcattttggtagcagtatttttaaattcctctgagatttttatgacatggtaataaattaggactttgtaatagttttaattttaagctagagatttttctaaaccttcaagttttatgcatgattatctaagagaatattcttcacatttttaaattgcccttttaaaaagccttaaattgcccattttgtaaaactatatattcatatttgtctcaaattataattttcagtatgtctacatgaaattgtatacattaaattcaccattagtagctaatattcatgccttgaaaatagatttggtgctctacacttacagccaaaacctactataagtaggtttaaagaatacataaaatacattttcctacggtgcctgtcatttcaaagaccaaataaacattttgtgt

SEQ ID NO: 35144 - DNA, 1903 bp, Mus musculus
gaaagctctctggggctgcagctacctatcaccagcgactcagccctcgtcagttctttattttggccaagaaaagcattggagcctggcctcacagggatggtgtctcatcagtccttgtatccatggtaccatctaataaggtgccttgtacatagtagatgcttaattaatgttgcttgtacagcattgtcctccagccctacaagaattatactctgtttacaaccatgtgagatatacagacacacacacacacacacacacacacacacacacacacttaatcatactgctttggatgccagctgtatgtgaccttgggcaaggttttccatctatcttatgttcttttcatctataaaacagtgtattctctaaagtcccttctagatcccaaacattacaagcctgtgattctgaacacgggtgggtaatgtacccacaccagctccagctctctccaggagccggcagctgtctgttccttttcagcagcgtttgataacttcagagtagctgtagaggagcagcctcatcagaaacgctgcttcagggctggaaaggtagctcagtggtagaacgttgcctggcatgtgggttcagttctcagcactacaaaattaaacaaacaaacaaacaaactttaaaagtcctgggatgcttccctcaaaagcagaaaggatatttttaacatatctaatatttttctccttagaatcagagggaaagaaggggaagaaatacaaagaaaggaaagtgaccaggatggggttttttttgtaggcttgtatttcatgtctgtgtatttgcatgatttcattccagaagacaatcaaaggtgcactgtgtgttgcaagaaactggcccaggatttaaatttctgtggacaccatctagatgtgggtaggcagaaattggccaagcagagaaaggcgatggataaaaagtacacttcctgagtaattttactttagtaccaaatgtcagccgtgacaatctttatttaaattattctaagccaggtatggtagtgtccacatgtaatcccagcacttgggaggtgcaggagcagtgtcagaagttcaaggtcatcttctgaagcatagcaagttcaagaccagcctgggatacaagagacttagtcttaaattttgaaataaatatataagtaaaagtaatttgtatctctgctactttctttttaagaccaaaactatgtacatggaaaagcatatttatattttaagtaagcctttatcttaatcgtgtttcatgttttttcagaaaacaagcaacatttttcattgcacataaacatgtaaaattcttgcatgccactggtcataatggcttaccagttctctgcctgtcaagtgtgactttatgtgtattgttacctatattgtgttggagagactaagggacataatattcttgtaaacttgtcagcattgttggtaacattgtttatgtgagcagatgctgaagagccacagggctttatttttcatttgatattttttgagcaaagctaggtgattggttaattcactaggaatctaaagactaacttgccttttaaatttgaagttgaacatcttgtgaaaagtaactgtgagataaaaaaatgtatagagtgtaaactaattttatcctcataataaggaaacccattgtcccacccccacccccccaaaaaaagggtgcgatttttgggccctttggaattagcacccagagctaatgttaagctaaatagaaactgttttaattaaccaagattttcctgctttcaaagatgttatgtgttcacttgtgtctggaatgatagttgtaaattaaaatgtaaaaaggggggtggagtcaataaacttaactttaaatgtaaacgcctggttcc

SEQ ID NO: 35145 - DNA, 5134 bp, Mus musculus
gctggagagctggctcagcagttaagagtgcttgctgctttcccagaagaccagagttcagcttcagcacctgtgtcaagcagctaacttgtatagctccatcctcgggggactctgatgcctccagcctctgagggcatccacacataggtatacataccccctatatacatacacatgattaaaaatagatttaaaagttatggtaccttaatcaaagtttctgatacataatgaatttgacaaattttaaaagcaattgttgattcatctttagcataaccagatcaccagctaaattgtgggcattgtggttaattatataggttttttgggggttttttggtttttttgttttttgttttttgttttgtttttttgtcacatgcaattgcttctttgccttttggcttaaaatcaagcattgatttttgtcatatatcacagtaaatccagctatttgcaaacattaggttaaaaggaattgtcagttgctaagatgtttgtcacctcgaagacagagcctgtgaagacatgactgaagtgaccatgaagtgactgatttcctagtacaacaactggacagcataatgcaaatttaaggtaccaagtgatggaatgttttggcccaaaataatcacttttctctcctgtcatagacatcagccactgtcaggtacctgtgttagctgcccttctcactgctgtgactaaatacctgacaaaaggaatataaggaaaagggggattcatcttggctcacagttttaggttgccaccaactgtggcagagaaggatagcagcaggaggatgagacagttgtcacatcactgtcacagacaggaagcaaagagagatgaatgctggggctccgcccactttcctttcccccctttttatttagtctggagttccagcctatgggatggtgctccccacattcagggtgagttctctcttcttggttaaacttctctggtaacaccgtaggtgattccaaatcccatcaagttgacaatgaagatcctgtctagcatctcttgtccttccttttcctctcctttcatgacaaagcatccttcttgtttcccttctctctatgtcgctaagtcagtggttctcaacctgtgggtcacaatccctttggaggttgaataactctttcatggaggtcacttaagattattggaaaacacagatatttacattacaactcaaaacagtagtaaaattacagtcatgaagtagcaatgagataaatgtatggttgggggtcaccacaacatgaggaactgtattaaaagcagtaagaaggttgagaaccactgctctaagtcctataaaggtgatgggaaactatcagacaagaaagaacttggagtcaggaaccttgggaaaaaaaactggacacttagagggagaaactgaacacttactgtgctataaataaccacagctaaagcaaaaattctcagacacacctcattttcttggctcatttttatactcttcaggacataataaatagggtattctgacattttttgagtcacccccaagtgctttaacttaatactttatctccctgtcaatctaaaaatgtatttgttttgttttatcccttaatctgatctttccttccttctcacccacttgggtgtggtattgaagccagtttgtataggtttgctggtttgttcagttttcaagaattctttaaattcttgctcaaaattgccctgctaaaaattaaggtgtggtagcatgccctagtgatcctagcacttggagtggacgcaagatcagtgttggctacacagaaagtctgaagccagcctgctacctgagacccctccctcaacttgaacatgaagtggcttgtacttacagtgaaatcgatgatagtaaaggcaaaactatgctcttgagattctttacgtctgttgtgcctgtatggcatacagaccgctgtgctatagcacaggtcgcccctgctctgccagcattaacttcttggccatggtgagaagagtccttgggaattatcaatgtgtaagaaaatggctccattctttcctctagattgttggctgataagcagtcatccattctacctgggtgaaatgtatagggtgtattttaatcagaatttttggttactctgttgccaaaggaaggatgctaagtgtctttcctctctctcagccacagacttctttaagagcagagtccctaacaagcttccttttcctgttttcattcactctcttgcctccattcctaagaagccctggccctgcaaattattgtctgcagccccatattgtagagagtgggttacaattgttgacacaccctggcaaaaagcaagaaaaaaagtcatatttagatcatagatattcctttttataaggagttattaatactaataagattgtagaacattatttttaaattcatactggttttatcttataaaatgagtttataagattattactaatcagctgttttatcatcgtggatttttaactagcatgtaaagtgacatttccatcagcatttatattttgaagggaactactagaagataaaatatacatcttagggcatctatcaaatccatttaattagatgaagacttcacctcccacctgcccaaaatggaccattaatttcatcccgatgagacataatgtgtgtgaattatttttataagtatctgttttgctagctagtgtgttgatgtattttctaatgcctgtatagctgtttggagggagctcgtgtttgcctaagcctgctcccttcccctttacagttgtacaggtccataagtgaaaactcactcacctggacttgacttgaaggtttctgtggctgatgtcttgtcatgacacctgtaaatggatggcttttaggagattatttgtcaagtttagagatgctaactagtccagcagtacaaatgcatctctctgtctgcttgatgtgggcagcagaatttccttcatctttatcagcatgatcaaatcccttgatttctctctctctctctttctctctgtctctctgtctctctgtctctctgtctctctctctcgtgtttgtgttgtgtgtgtgctcgtgtgcgagtgtgtttgtcagatatctaagtaggtatttggctacatctggacaactgattgaaggggaggctctctccccagttccacttcccctccccctttagagcagctgcagacccgggttcatgggaaatgaccctggagtctgcagtttctgtcacctaccatcacatttcacagttgtgtagagatgactcttgaggaaatcactggattattccccatcagatcttcctctatacctaacgtgagactcatttcatacttaggagcatcaattagcgcccttcttccatctctgtaggacacactgtatatagacattttgtacataatgatcaccaaatactgttgtgaggtatttggctgcatgtggaccatgagttgacgggaccatgcttcccttgcccctcccagggttgttgggggcccaggttagagaatcacatgcctggaggggcaggtgctgctcacccatctttctgcacacagctcatctttcagtagaagttcattcccatgttaaagctcaaaaaatatcacagtgcctgtactcttggcaccagttttctcaaaggaagactggtataccaaaccatgaacagctgcttctcttccatgtggagatgtggcccctggtgggcactagcactatggaagccactgccttctgaaaaactgccacaagacatttctcatgagcaaagcgtagacttggtgtgaaagcgtcagcaggctctcgtgctcagacagtcgtggagagccggtaaaagtgtttgaacagacgtcctttttcattgctgaaaagtattctgctctctcctcgatactttgaaggaggcaagaaacataagaattctggactgagaagtctacacgtgtcttagggttggggtgacagaatgcctttttggaaggtagctacgggggttggggggtgtaatgacttacttctcagttcccatgccctgctactctgttctcacttaaaagactgaaagacacctaaaggaaaggtataaaaacgtggtaaatgtcagggtgatcccactgggtaaatcacagagcagccttgtggaactagctggccagagaatagagcccagaacctcagttttcattctttccttgttcccccagttctagatctgacttgacgcagtgactcaagatccttacacaggggatgggctggggacttaatatttaaattagcttaatgcagagctcagttctgctcactcctaactgcttgtccttcagcctgacagcaacaactgaaccatcagtagatatgtgcgcaaagggttccaaattttatgtccgtatcctgggttctgttctagaaacagtacttgaattggaggtcaggcctatctaggacacactgttggcttggagagggtgaaagagagggcatgaagtcatgggcagaaaagaggaaccagctaaccaggcttagttggctgggtcttgtggcagtcattcggagcgtgctggctcagctggttggtatggtgaacaggtgacataccaacagatttggaggcttaatcccaatcccattaccaacacttagcaggtgtacgatcatgggcaattcatttaattgcctgccaattatagactatatgggggaccaacaccggaaatggaatcaagtgacctaaacacttgactccacactctcttagctgggtgactttgggggagccacttgctctccccagcctaaagccccccagctattaaaggggaacaatatcttcactaactacctcacagaattgtagtgagaaaatagaatcgtatgactggatgaaaacagcatagaaactagaaagcactgcacagaagtagatggctttagtcagctcgctaatgtttcccagagtctgttttattctgaccaatggttcatcttttggagtaggacaagaagcatgggtacggtgtaagggactagaattattatactttacatagagatgagaggtggatgaca

SEQ ID NO: 35146 - DNA, 1103 bp, Mus musculus
cttttgtctggtttctgtgcatcttagctactaggctagtatgtgtatacttatgaatctgtgatatccaaaagaggccattattttttctgttctctcccatgtgacacacgttcttctggaattgcttgcttctgctaaacacatacttagtgtgatgtagacttctgttcaaatgctttcgaacctgtgatttgtctaaagcggattgtgctacttttaactttattatcctttcctattaaagtataaatcagattgtccttacttttataaaggcttctgatctttttattttattttttaaaatgttattcattttatgtgcaggggtgttttgcctgcatgtatgtctgtgtaccacatgtgtgcctggtgcctgtggaggtcagaagagggcaaatccctgggactggagtcaaagtctgttgtgagccatcaccacatgggtgctgagaataaaaacctggtccagggtagagcaaccagtgctcttaactgctaaagtgtcttgccagccccaacttctgattctaatgtaaattcagatgtaaagaattaggtacttaatctctggtcataattagtctataatgtgatttctcaacttcaacactatttttaatacattttaaaaattttttagtgttttgaagccagggtctcatgtagtctaggttggccttgaactccccatgtaggtaaggatgaccttgaagtgcagatctttctgctttcacctgctggagtaaggtgtgcattccgtgtgacattctgttcatacagatggaaagattccgtgtttcaggaggctgtcctgagcattgtagggtatttcacagtacccagctcttcccaccagacacgaacccttctattcttgtctgcacatggctggatgttcttctaaaggcaacatcacgcctgttttttgtttcttccttatttgtttttggcctttcaagacaggatttctcttagccttgactgtcctggaactcactttgaagaccaggctagcctccaactcacagaggttcacctgcctctgtctccagagtgctgggactaaaggtgtgcgtgtgtcaccactgcctggctcc

SEQ ID NO: 35147 - DNA, 1127 bp, Mus musculus
tggtgacgaatgagtttaaaagccctgctacagcttccagtacgtcagtgacaacccgcgcgcgcacacacacacacacacacacacacacaaacacacacacaaagcacagcatatgcacatgtatgcatgcacatgcacacatgcatgaacatccagttgctattgcttgccttagtgagacttaatagactcttaagactccatagttcacagccaactatgagatcctctgactatttccttcaatgggaaattgagtaatgcctacactgatagatgtggcaggcatttccttccctgtgctgccagtaagaaaggctgaagtatgtgagtgctgaacttcaagaaccatagcaagaatgtgtgcagctaatacatacttgctgccatggtatgcttaatattggatgcaactatagttgtgtatttagacaataaaaggcaatcataggtcaaaatttacatttttttttcaatagagcatgacagttctttgaccctggaaagttttactgactgaatggcaacctcagctattcttcacatatggaaaagaacagggcatctacccagcccagctaggactcttgaatactttgaaaagaccctcagtctgaagataggaaatattttaacggtagtcatgtttccaagtctgtctctctgcacagttatcctcttttacaaaagcttatgatatggcaaatagatttcaatcttattccctacaacgttaaagaatttcctaatatgtaaatatgtctaatcactcaaatgttgacagaatgaagcattcttaagaggctgtagttactcagcactgtgggattcagaaatggtatggaaaggaatatgtttttttttttttttcttgaaaacagccttgctttctttactcattgctgcaaaactggaacagaaaggaaaacaaaaacagttgctaactggaagtgcgccacagagattctaagcccttccttggcatggcctggaaggcagttgcatattgagtacagatggtttttattaactaggtatatagagaagtattacagctatttttgtacttcgaaagatggatattcaatgacatggatattgttttatgagtagtagataactta

SEQ ID NO: 35148 - DNA, 1706 bp, Mus musculus
caggtcatgctgatctcatttttagaggcacatgttcactggtcactaaatatctacttctaaaatgcctatttcttttcttcaggagaactaatgactgttgccaggtggatgagagagttcattgcaaaccatcctgactacaagcaagacagtgtaataactgatgaaatcaactatagcctcatttggaagtgcaaccaaattgcagatgagctgtgtgaatgtccagagttacttggatcaggatttagaaaagcgaagtacagtggaggtaaaagcgacccttcagcctagccttcagccagcagagagagagagggtgatcgctgtttaggatggcgtgtgcagccctgactcctggcccgctgggacgctgggaagaccaagatgacctgcagtgtttctgcgccagttgcctgcaagtggctactagaagctcccttcagtaggtaaatctgagtttgtacatgtatatactaaagtatttttatgattaacagtgtattttaataacattgtatctaaagtcatagtgaactggcttgtacattttgaattcttactctggagcaactactgtctaagcagttttgtaaatgtaattgtacaataataccggcattccagagtttcaaatgtttactgtaaatcttcctttaatactacctgggacctgattcactgaaatttacttaaaaaaaaaaaaaaggctttctcacacctgtttcttgagtctcctcttactatgtaggtaaagtcactggactgcattgatgccctccgtgggtgaggcaccttacctgtgatatttcctttgcaaagcagccccactctcttgccactgaattctgctagctcttgaaaagaaactactttaggaattgtctaaatatacagactcagagaatatttcatctgaaaaggaaaatcacttccttctacatacactgagagctttgtcaaatggtgtccgctcttccattaccacctgctgtctgacccctgtgctgatgaataatcaactcagtgcagcagccacggtttcctgcccttctctagtttgcaggagcagattgacaggctgtcttctaacagccattcatttcattccagactttccccagggagtagtctccacccgcttgctttctctataaaactcacaaatcaatcatgaaatgcactaatttttgtgaatcaggaccctaaatgtttaattgtaaataatttgtttcatagattgcttttagctttgtgttatctttttaattgttaactaaatttacttctaaaataactactgtagattaagccaagctttacagatataaatatttacactgtaatggtaattttgaaagattgcaataaagccgcttcatcttaaagctttcaatactagaattggctctatatctcatttacttcagaaagtatttttttctacagttctcttatgtaaattaggttgtaaaaagaataaaatgtttgtggtctgagaaaataaaaaatgggattcctattcaaaggtagtacgtgtatgagtggctttcgggggtttggattggggggacttttgtttcaggttttgtttttatttctaactatgtcacctgggtactggtttgtcctcactatgtaaatcagcctggtcttgaactcatagagaccctcctgcctctattcacttagtactgttaaac

SEQ ID NO: 35149 - DNA, 1193 bp, Mus musculus
tcctaggcccttgcagtgctctaacccctaagggcacctgcatgggcagcccttcgtcagaaggcacaggaggcaagcgcagttcatgtccatcccattctgggaggttggtgacagcataaatgctttgttgactgtaactaagcagagctttagaggaagtgaacagggactaatgacccttgtggtcagggcttaagaggggaactttctatttcttacctttagatagtctgaacataaggcttgtctgtttgaacaatggcgctggtggagcatctcaggcagaacgcttgcttaaggttgcccaaggccccaattctgttctcagtactgcgaaaacaaaaagtgcagacacaggactctgctggtctaagaagccagtgttgagaagcctcctgactggcctagggaagcccgagttgctgtcctgatgtggacttggccccagtgggttttctctacatggtgtgaggtctgcgaggtgtatgctgcactgggtaggaaaggcacccaggttccataaggagcatcctctatgccctgagaatggacgtgtcagtcgttagtggtttgaggacacgaggtcattctgctctgttagagctggtgcgctgggctggtgtttcagccggaggcacctgctgccccttctgttctcttgggatccctccggcttctccgcactgaatcttccttctaggtgagcatagtcactaggtttgtctgacacgactgagacgacttgaaagtacctttgttcctaaaataaaaccactagtcatatgacggcttatatattagcaaggaatctgataataaaaccatcgtgaccttgggccacaatctgtagaagagatgaatacataaatactattattatgtttgctttttaaaaactacaacattgcaaaccggctttgaaaaatagcctgcacgttttggttctgggagccctgcagtcacctccacacactggaagtagttataagatacagatgtttggtcgaactttaacaaagaagtgtgttttcatattgcttgcttaaggttacacgggctcgaatggaaaccttttaagtcattttctgctgagggattgtataattctgttatgcctctcctctcttttaattttaacttggactataatacagcctttgtacgctttgtacaaattagcttagagaaca

SEQ ID NO: 35150 - DNA, 1204 bp, Mus musculus
agtctgatcatggccgagccaatagtggtccattctttttactcactggcctctattgctggctccccagtcagacccagtgtccctcacctggctgaagggcacactgcttgtgcctgcacgtgccgggcactcactgagctggaaggcttttgaatgcaaactaccatctcttaagttttccaattccacattaattcagtaagcataataaacttagtgggtagtttgactttctattttctttcagattctttgaaagcatgtttatattattttacttagcgtaaacacaagtaataaattattctaaacctgtatcaaaagagctttgctttatttgatgtatatttgtatgtggtttgcttttattgtattgcccagactaaaggcaacatgagtgtcaggtggctttggaagtggtctcccttatgtgttgacgactaaatgttttccttctgttggttttcagatacaagagtcaaaggatggttcctcctggacaattacatccctacgtttgtctgttctgttatttacttactcattgtatggctgggaccaaaatacatgaagaaccggcagccgttctcttgccgaggcatcctgcagttgtataaccttggactcaccctgctgtctctctacatgttctatgaggtaggtcagtggctctagggcttccttccacggagctgtgctgctgtggccgcctgaggtgtgtccctacgtgaagaaaggcatctgtttcactcgggagaaagagggacagcgagtccgttaatgcattttaagtaggttttgaagtggatctttataaaccagatgtctgtacagatgtcccctggaatacctcaaaggagaagctttggttgctgagtttttgtcgctcgtgttttgtgtggcacactgagaactaagctaaatagcttcaaaaacattcttattcgcgtaacagataggctggaaaacaaaggaaggttgaagagcggatctgggtacattttattattaataaatgcttgcttctcgtgtggaggaggaagtgggtgggacagtgggaaattctgtggcaattcagcttttgttttgatctggtaacttgtcagatctcacaagttctgtttttaaagtgtcgctgtccatattcattgcgcatggcactcttgtgtgggacactgtgttgtgtataagctgattttag

SEQ ID NO: 35151 - DNA, 2411 bp, Mus musculus
ctcaaaaagtcgcaagggtgattgaacataaagtggttatttgagcacaggaaatacgtggtgagactgatcagaccaggaaaccaggcctagtgagatacagaccggtacagttcatctggttagcaggcactgattcgccttgtacatttcagacttacaacaagaaaggggcctctcggaggaaagaccacctgaagggccaccagaacgggtctgtggccgccgtcaacggacacaccaacagcttcccttccctggaaaacagcgtgaagcccaggaagcagcgaaaggattgacaagccgagccgaagcctccagaccgcggcgtgtgattgtaagcacagcgtgacttgtgccctgacgctcatagcagctgctgtcactagtctggccctactatctgcagtgtgactcatgtaggaccttcttcatcagttcaaaacccctagaatatgtatacagattatacaaagtaggcatacgattttctcacatttctgggctctcatcgacccccgcgctagactgtggaaagggaatgttcttgtagtatacaacactgctgttgccttattagttgtaacacgataggtgctgaattgtggttcacaatttaaaacactgtaatccaaactttttttttttaactgtagaccatgcatgtgattgtaaatttgtacaatgttgttaacagtagaaaaacacacatgccttaagacttaaaaaagcagggcccagagcttgttagtttaattagggtatgtttcaactttgtattattcatttgtattagctctgtttagaaaaatcaaatgtatgatttatgaaacaagtgtgtgatgtgtaacttcaagtgacttggagatgcgaaatctgatggcacccttggttttataacgatggctttaaataagcaggttcaagtctagtggaacagtcagtttaactttttaacagatcttatttttttattttgagtgccactattaatgtgtttaaagaggtggggaaagggtccaaagcgtctggagacacttacgtacctgtccctggtcccccagaggctagggtgactataagagtaggtcacttttcacttctgaagtgcttagtgtttttatacaggagataaaaaggccattcgacttcccaccacttggagagagagaactacctttcaggaaaggtgacgagacatttattatctgacagacacacacacacacacacacagtgataagggactggttacctgggtccacatttttttttattcttttctgtagtgctactttgacatacacttccttttaaaatgtgcctaatttaccaagagaccaggaagcaccataagcattttgaggtaaaatttaagagctggagcgcgcaggaactgggtgtttgggagcaaccgcttttttcagtgtgaatcatggtggcatctgtaatttttttctgattagcacctaaagatcggtttaaagtgcttggactgcttatcctaaaatcgtgtctagtgcgctcgaggcatcggtcatacaaatggggactcttttcatgtgtgtcatttttaaagtgttgaaagcttagcctttgaataccttctgcattggtaaaaaatccatggaaccactcatggcacatcttaggagatgattgacaatgtataaactaattgtgggtttgatatttatgtaaataccagtttaccatgctttaattttgcacattcatattacaaggagccagttggtcctaattagccttgtgggttttctgtttggaaggagttgcggcatctgtttacatttcccttgtcagatctagaatgtgtgtatgtgtgtgtcttctccctaggtacccgtctgcaggtgtctttacatatctcaatacaaaaattataacatttgatagtgtgctgtcaaagtgtgcttagctcatctggatatacccacactgttaaataatgtctaaacattaatcattaaaacctttttgattacccgtgctgtgtcttctgttgtttgatgtgctgacagttctgaaagactgcaggatggtcaactctgtcaccttgtaggagcttagggagtggacatgagtaatgtagcgtggaaagtggttgtatcagttgggggctctctagagaaacagaactcatagaatgagtgtgggggtggggggaggatttattagaatggcttacaggttgtggtccagctagtccaacaaggctatctacagacagaggatccaaggatccagtagctgtttagtccacgaggctaaatgtctcagctgctcttcaggaaacacgggttccagagcagtcgcgtcgaatgccagcgaaggatttgcttgagtggactcactagcaagagtgagaacaagcaggcaaagagaagagg

SEQ ID NO: 35152 - DNA, 1240 bp, Mus musculus
acttatttttttcactaactcataaactcaccacaaataaactaattaaatcccaacacatgagcctaaaaatcctaagtctttggataatgaccaaaatgttttcatttggaaaacttggtatggactttgcaacaaggcagggtccacactagcacagcttttaaaagtaataagaaagatggctttttagattgtctttctaagtcagttttgaaggtgctgtgggaccagtgtttaagctgtctgtttcaatgatctgacgcactcaatctactccctccctctcggtttcagcatcgaagagaacgaggacgccagcaagatggccgatctcctgtcgtacttccagcagcagctcacgttgcaggagtctgtgctcaaactctgtcagcctgagcttgagaccagtcagactcacatatcaggtgtggctccttggctgttgtcactcagaaacccttggacctcggggtgaagtcaggcgattggtgacctagatggtggtgatctagttatgatagaaacagctggcgatgtaagcctgtgctattcagaatctgaaacaacagaccagggcatgcaggtgtttgggacgccatacttttttcactgaagcccttgggaagctggaggaactcggtgccactgtgcgcatcagccagagtgtgcagtggtcctgatgaggctgaatgctcaggagttagcatgttcatatagtaagtactgcttgtttatgggaggactatttacatttttcttaaataaaaatataagaatcccatcatttttcatattgattttagtatatcttggtgataaaataactatccaggggaaacggttctttagcattaactctgtgcggaaaagcgaagcctcccctgtgtagtgggagtcgtcgtttgctgctggcgagttaatgtgctctgcctgcgtctctgcgctgtgtctctgaggctgtggtttacagctttctcagatgcacagtgccctcggaggaagggaagtcactgaagatgattttctgttgcagtcctgcctatggaggtgctgatgtacatcttccgatgggtggtatcaagtgacttggacctcagatcgttagagcagttgtcactggtgtgcagaggattctatatctgtgccaggtactggtttttggaaatgactcaggcagtgaagtaaaagatgatagccttttgtcaagtttgaccaaaccaaacaaaaccaaacaaaa

SEQ ID NO: 35153 - DNA, 1175 bp, Mus musculus
gtttctctgtatagccctgactgtcagggaactcactttgtagaccaggctggccttgaactcagaaacccacctgcctctgcctcccaagtgctgggattaaaggtgtgcgccaccactgcccggcttttttatgtctcttaattattttctgtattataaacttaatacaataaaaattgttgtcttttgacatggtattagtctcaagctacttctgctgacttgatcgggatgatcccccagccccaggacagtttggtttgcagttatctcagcccacaagtgtatttgaaagtgcttccgtgtgtataaaagtgtgcagactagctttggaaggattttatataaggaggtgaacgaaaccctgagagaggtgcgaaggggtgacggtcacctacggatgttgtcaagagagtgtttgagctgcagagagcagtgcagagggagtgtgtggttggatctcttcactctccctgcaggtttcttccaccgggacttaaaacccgagaacctcctctgcatgggaccagaacttgtgaaaatcgccgactttggattggctcgagaaatccgatcaagacctccgtacacagactatgtgtctactagatggtaaatgctttttctctctgaattatctaattatgcttttttttccaaaagatacagttataatgtatcttatatgtaatgacagcaagtgtaatggcacacacctctaatcccagcacccaggaggcaggaagatttttttatgagttcattgccagcctggtctatatagtgagttccagcctggccagggctatctagaaaaaaaaaaagaaatcaaaacaacagaaacattaaaacattatgatgagaacagtattaatcacaaacattaatttctcactaaaaggaacaagtagttcaaaccctgcagatattttgttattaagtgaagtgtaagcttgttaaaaacaattttcaaagaaaaaccattgtgctctctgtagtcttagtaatttcttaagtttttagacttgttatttcgtgtgtgtgtgtgtgtgtgtgtgtatgtgtgtgtgtgtgtgtgttcgtgcacgtgtgtgtgtgtgtgtgtgtgtgtgtgtgtgtgtgtgtgtgtgtgtgcatatgcaccatatgcacgcctggtgcctggagtggtc

SEQ ID NO: 35154 - DNA, 1216 bp, Mus musculus
tggagttttcctcctggtcctgcacgtgcagggagctgtgctaaaatgaaatgcagggcttctcgaaggagcaagctctggtgaggtgtttatcggtttgtttctcagacttgccctagcctttaaataccacatggcagcctgctttgtttattcttacatagctacaaagacccaggtagatttgagtctcttggctttattttttcatctaagcaagtgtataaaccattggtgttctatgaacattaaccaatcggcttaattaataagaagtttagtttctgagtatgaaagatggggaggagatacctaatacaagctgggtcagagtctctgtcccacaggggtgctgtgtcccgcaggagtgccatatggctgcagtaaaaaatccacataaccaactgagagctgccacgagatctggtgttccatgttgacctagttcatgggaagaatggacaatggttccatgctgactgcgacccccagggcagactgattgaattttcaccctagaattttcttctcatttcttttcctttttaaattttattgtgcatgggtgttttgtctgtgtgcatatctgtgcatcgcgtgtgcagcatccaaggatgctcggaaaaggaagtcagatcctctgggcttggagttactgagtgttgtgagttgccacgtgggttttgggatgaagcccagtcctctgcgcttttcacggttgagccacctctagctcagacctgtaacttcctactaggcacctagaaactgctgctgctggtccccaagcgcgctcaggagattgccgcccacttctaaaacagaagccaggctgacttcttttctcacaagcaaatgttgctgtaatctgcgacggagaagggacatttttaggttgctaggtttccatgtttagtgacttgcacatgtgctctccttttgaccttggaactaagcctttgttggagctgagctgtgaaccggtacctgtggcctaactcaagcaattgtattaggagaagtgttcttccattttctagaagattttgtacttctttttccgtctaaactgtcacccatgatggctgctttctgctcagtccagctgagctgtgcgctggcttctgggttgaggagctgcatatgggtgcacattctctgatccttctgggtggggttcaacccccaggtcatcataggaaaagcccacttggcg

SEQ ID NO: 35155 - DNA, 1128 bp, Mus musculus
caagaatcagcaacattcctacaattaagaagttcctgcaacccggaagtcagaggaagcctcctccagatggcccctatgttgaggtggtcaggactgtcctgaagttctagtgcagcgtgctttaaggtggcacccacaaggttccaattgcagtgtcaccacaggccagctgcagagcattccagaagcaaggtatatagatcccaggagtcaagctcttcaaacaacaaaaccactctgcccacaatgacaaatgccaattaaatacagtggaaaactattctcgttggagaggtgtttgttttgttttcagcttgttggctgtggatgacagtctacaaatgtcacaaaaccagagtcgcttatgaagaagtggtaggcagacagacagacagacaggcaggcagacagatgtattcaggacattgagctaaagtgtgtctgtataaaggtcaggaccataactaggttgcagtggtgacttagtagcagaggatggtttcagtatctacactggcttctgagaacttgcgatgctgaagtgggagcagaaggaacgtctgggacactactctgagaccctattaaagaaaaacaccttgcacatcagacagtcctcttccggcaacaagagccacggaagctcaggttttactttgcctagacattcctagagaccagcgggaccaacacatagccagtgaatagttccttattcaggctcagcagaagcctcctcagccttgaggtgctttctttaaatgttcctattatgtccccaagccataggttaaagctggaccccacgcagggttcatttgatgggaaaagaagaggtggggatgttactgtgacttttggtggcttctggtctagagaaagctcctgctagtagtttggaaaatgtgattgccagctccaaactcctcctaggacaacctgtctgttcttaaaaattacatttatttgtttgttgtatgtgtgcgtgcacgtgcgcatgtgcccgcacacatgcatacacacacatgacacagagtgcatatggaagtcgaggacaacttttggaagtcaccctgagagttggactctggttgatggttttgtgggcaaggatctcaacctgcc

SEQ ID NO: 35156 - DNA, 1524 bp, Mus musculus
ccagggccttgaaggaagatagtgggtacactttaaagacacctagagctttaggtggaaagaataaaattccaattttccttttcatttttattaaatgacaagaatcattgttgagttcttgggagttgctttggcatctgacaaaatgagatcccagtatctgattctttcgggatgggaaaagctatagtcttttagaagtctttgaactttccagcgtggattctccacttttttggggttcagaccccgtcagttcccagaggaaggtcaccagcactgacttctattcccaagacccccccccacccccacccccacccccagattcgaatacacatacaggcgacaaacctagttagcttgaatcaggcaggcggcctgccttagtctccccaggggcatagcctgcgggagccgcctgggattgggccccataggaggcgggccctagtgggcgtggtctagtaaaacaccgcccacacaggtactaaaacttcctgaacctggagctgtgggccgtgcgtggtggataagcttgatctcgtcttccctgaagtctggttccttggcaggatgatggtgaccctcgtgacccgtaaagatatccccccgtgggtgaaagttcctgaagacctgaaagatccagaagtattccaggtccagtcgctggtgctgaaatatctgtttggtgagtagctactcttgacctcgctgccaaggcccaaagctccgggtcttggaactatgctcattgcctttccccggacaggcccacagggatctcgaatgtctcacatcgagcaggtgagccaggccatgtttgagctgaagaacctggaatctcccgaagaacttatcgaggtcttcatttacggctctcaaaacaacaagattcgggctaaatggatgcttcagtccatggctgagaggtaccacctgcgccagcaaaaaggtgagagtctctaacaggtgccctgaaccaaggtgcggtggagtagcctcctgcctccaccgagtttacctcccttttcacatctccactgcttgcatccctctgaggatgccttacttttgggcatcacctgggactcctccttggtctctaggccgtctctgacaaccttttgggagttcgggggcccagacgtaagtcttaaggtgagaaggggtagggacttatccctctgggcagggttatctgaggtaaccctgccccaccccactcccatctccaggtttctaggagaacgttagaactggcccagtggagccctggttctaattagaggtccacaaaaacatgcttaaagagctggtgaatcatgcggccttcctcctgttccatgacacttaatcctgtttggtgtttctcacgcaggagtgctgaagctggaggaatccatgaagaccctggagctaggccagtgtatcgagtgaagccagtttccagtccttgtgtctccgacctggatgcaggttaagctgtggccagtgtttggttctggcgggatttttagc

SEQ ID NO: 35157 - DNA, 8765 bp, Mus musculus
ggagttaagtgctcacgccactgagttcttgtggacaggggattttgagctagagttcgatgtaacccaggctggctttgtactgctggtactcccgcctcttcctctcagctgctagggtgctaggcatacattagtagcacagagaatacgttgtgtgttcttggatgacctttgtggatgtgtcactttgtggatgtgtccctttttattgcttattatttattttattattttattttgagacatgttctctctatatagttctgactggttatacagaccaagctggccttgaactcacagagattcttttgcctctgccgctgcctctgccacacacacacctttttttttttttttaaagaaagtgtatgttagaaccctgattttgggctggagagatggctcagtgggtaagagcacccgactgttcttctgaaggtccggaattcaaatcccagcaaccacatggtggctcacaaccatccgatcgttacgagatctgactccctcttctggagtgtctgaagacagctacagtgtacttacatataatcaataaataagtctttaaaaaaaaaaaaaaagaaccctgatgttgagtgttcttttttttttcaaatacacaccagaagagggtgtcagatcccattacagatggttgtgagccaccatgtggttactgagaattgaactcaggacctctggaagaacagccagtgctcttaaccactgagccatttctccagcccttgcctctggctcttaaatactaggagtaaagttgtgtgcccccacacctggccggatgctgctgcatttgctcactatacttagaaaacatttgagagtcccttttaatgtaaagtttagtatattacaaggaattttgttctgagtttggtttacaggacatgggtccttatgttaataaaactatttacactggcagtgctctggatgttcttaagtatgaagaagtggacatggagtcgctcgtcggcgtgcttcccgagcccttggagaagtatactgcatgtagagagctcgccagaagactgaaaatagaaggtaaggagagctgtctgcctaggtgatgccatccttttccgcgtgtgcagatgatggacgagcagtagaccacccagggcagtgtttgctgagcatgcctgaggatgatacaggctctgcatgaccatagctttgtcctcaagcatgcagcataggctgatagtgggaatggtgggattatacaggaaaagactctccttgaggagcagccagggcggtaagattggcacttccgcccagcgtcagtgctcccttcagttccacagctggctggaatttggctgaggacagagtgatgtgtgctgcctgccattccttgggtcattgtataaaagggtagcaataaagaaaaacctagaagaatcctaaaaacattttcccaaatgacccagtactaaaacattaaatttgccgggcgtggtggtgcacgcctttaatcccagcactcgggaggcagaggcaggcagatttctgagtttggggccatcctggtctacaaagtgagttccaggacagccaaggctatacagagaaaccctatcttgaaaaaaaaacaaaaaaacaaaaaaaaacaaacaaacaataaaaaccacacattaaatttaacttataaaataacggaaatagaactggaaagatggttcagtggctaaaagtgtgtgatggtcttccacaggctcagggttcagttcccaacaaccacctgtaactgcagctttaggggatccaagttttctggcctccacaggctcctacagttgtgtgcacagacaccgcagacacacatgattcaagacaacttgcttaaaactcaagtcatccagtacagaatgacagcatggaagaaggattcagacttatgtcatcattatggttcctctgttgaacacttcagatagtagggtgtagcactggaaacagctgcttaggtggcagactttgacctcgctgtgcagctttactttgttcagttagcattgttcatcatcatccctgctgacaggaaagaattcagccatggagtagctgttccttgctccagtgcttagggggtgggggctgtgattagaatgtaaagtaactaatgcgtaaaagggccagtgcttataaacactctggccaccgcttgatacttacaagaaaccacatggggttaaagtacaatctgtatgggtgattgaattttttattttgtttttatgtacatgtatgtgtttgtgtgtgcacacatatgcaggtgctcgtgggcggcagaagagggtttccgatcctcttgagttagaggtacagactctagtgagctgcctgacatgggtgagacactagaacagcaagagtgggaagagctcgctcttttcctttggtttttttgagacagggtttctctgtgtagccctggctgtcctggagctcactctgtagaccaggctgtcctggagctcactctgtagaccaggctggcctggaactcactctgtagaccaggctgtcctggagctcagtctgtagaccaggctggcctcaaactgcagcaagcattcataaccactctccagtgttttttgtgtttatttgttggtggtggtggtggtggtggtggtggtggtggtggtggtggtggtggtggtggtggtggtggtggtgttttgttttgtttttgaagacatgaccggatgtagcccaggccagccccatcctaagcagctgaggatgaccttttactcttaagcccttttgccttttactctctaagtgctgggattgcagtgtatgccacctacctatttttgtggagttctggaatgtaatgattaatattgatcatcaacctgacaggatttagagtcacaaggatttaggactgaaaacatgccaggtaagtcctctgccaactgacttacatgtcagccagcccctagacaagtttcttgggggcagaactcagtgttatgtcttattatctttcctattttgcaatgtatatttgagaaatgaaataaatatgcccttggccatatgcaaggtctcaggtaccctgttaataacacagttactctccccttgctgtgatttctctcccatccctgacaaagaaggatgggtttataaatacagaggccatggtcgttggtcatagggatgagtgggttttggctcgtgacttgaggagagagcatcttcctgtggttggcggaacatgaggcactgacttatagctcatccacaggcaggaggccgagacactggtgcccggctccctctcccgctttgtgaagtctgagcctaacctggggatgaagccacctcgtcattctttacttaaaccatttcagaaatatcctgacagacatactcaaatttccacaatgccttttttttttttaagatttatttatttattttatgtaagtacactgtagttgtcttcagacacaccagaagagggagtcagatcttgttacggatggttgtaagccaccatgtggttgctgggatttgaactcaggacctttggaagagcagtcagtgctcttaaccactgagccatctcaccagcccgcctttatctcttgtcaaatcaagattcagtattaaccatcgaatcccattaaaccctgaggcctatttatggatcataaacttgtgccaggtatggcgaagcattcccatgtaaccatagcacttgggaggctggatgataggaaactcaggtgtttttttttttgtttttgtttttttttaagatttatttatttattatatgtaagtacactgtagctgtcttcagacactccagaagagggtgtcagatcttgttacggatggttgtgagccaccatgtggttgctgggatttgaactcaggaccttcagaagagcagttggtgctcttaaccactgagccatctcaccagcccaggaaactcagttttaaagaaaacaaaaacttagcatttagccacgtgtggtggcatatgcctttaattccaacatttgagaggcagaggcagaggcaggtgactctctgtgagtttgagaccagcttgttctacatactgagttccagaatagctggggttacttagtgagaccctgtctcaaggcagctctttaaaagaaccatttgatgggggcctgtagcgttttagaggttagtccatgatcatcatggcaggaagcagtcaggcatgggctggaacagcagctgagagctttatgtcctgacgtacaagcagcagtcagaatcactgggcctggagtgggcttgggcaacacactttcgccaacaaggctacacctcctaatcttttttttttttttaaagatttattgattatatgtaagtacactgtagctgtcttcagacacaccagaagagggagtcagatctcattacagatggttgtgagccaccatgtggttgctgggatttgaactctggaccttcggaagagcagtcgggtgctcttacccactgagccatctcaccagccccctcctaatctttctcaaagagtttcactcactggcggccaggtattcaaatatatgagcctataggagccattgtcattcaagccatcacatggcctaaagtgtatgacagagtatgtgtgggggtatgctcattccatggcccttgtttggaagtcacgggacaacttacaggaatcagttcttcctcccactgtaaattctgagtagtggactcaggtcttcaggtgtagcagcagtttgtataccctatcccctttttttgaaatgggtctgatatagtccaggctgatctggaacttttaggatagcctttataggataaccttgagctttcaattgccacacttagtaagaacctatccaaactgtgcgtaatgcacgctgggtaataggtaaaagtgttgtgacccacatgacctagccctcgggaggcaggtgcagggggatctctctgagtttgaggcctgcctggtttacagagagttccaggacagctggggctacacagtgaaaccctgtctcgaaaaaaaggaggggagggaggagagcgagaaggaaggagaagagagaacttatcctgtgttggacaagatgaaaggactgccttcacttagtttgttaaaagttttgttttgttttgttctttacttcttgattatgtcggaggcagtggtgcagcgtgtgtgcctgaagatctggagttaacaggtggttgtgagccatctgacatgggtgctaggagtcagactcagttcctctgaaagaagagtgtggactcttaaaccctgagtcttcttcccagccactcaactcatattttaaggtagactttgctgggcctgttctcacagtcctcttgtcccagcttgggaagctgaggcaggagtgtaaaaggtctacctgtccaactcagtaagataatgactaaaactctgaaagaggctgggctgggccctaactcagtggtaacagtagtatgtgtctccttgcctagcacgcagcaggcctgaatgccctgggcttgattacgagtaccaccaaaacaagtttgtttgtttttttaaactttggctttaatttccttttttttttttttccttggttttttgagacagggtttctctgtgcagtcctggctgtcctggaactccctttgtagaccaggctggccttgaactcagaaatccgcctgcctctgcctcccaagtgctgggattacaggcatgcgccaccactgcctggctggctttaattttctaagaatagaatgcatgataaaacaattgccaagctttctttataacattacataacattacttcttaataaaaaccttatctatattgcataaattatgtttactaagaaaccccatttctaaaaattactgctggggatgcagcctggggggtgcatagctgagtagtagagctacttgtctggcatgtgtaggccatgggattaatccctaggaccaccctaaaatacacacatgcacatacagcttcatgtagaaaacatacagcttcgtgtagaaataacttggagaaacagcccatctttaggacttaactttttttttttttggttttttgagacagggtttctctgtgtagcccaagctgtcctggaactcactctgtagaccaggctggcctcgaactcagaaatccgcctgcctctgcctcccaagtaggacttaacatttaatgttaaaaataagatttgcacagacaagaaattccgagtgagctgggcacggtggctgacttgtgtagtgttaccactttgcagtgcgggctggataacaatcggcagtttaaggtcatccttggctgtataatattcatctgcatgataaccttcaacttccttttcctcaaaaaggaaaggtcatcctcagggtgttcagggtcagcctcaatatgtggcaagtttgaggctagcctgggctacatgggattctgtctcaaaacaaaacaagaaaacagattacctacctcacctgtctccaagtgtcatgttgaatgatgatgtatgcagaagccatttgtaaatagtaaagggctgtacaaatacagttactagtgtaatgtgtgtatcataatacagttctcattttattcaccagccagttatgagtcagtattgtcatatcagctacaagaaataaaggaggttcagcaagatgaagctttgcagcttccacacgagctcgactacctaaccatcagggatgtgtcattgtcccaggaagtccgggagaagctacacttgagtcgcccacagacggtaagccaacaagcagcaggaagaagcgaggtctaagcagagccaaaaagggctcttgctttaattataggaaagagcggacgctgcggttatgagcacttgctgctcctgaaaagggcctgggttcggttcccagccagccacccacatggtggctcccaatgatctatgactccaggtccagggaaaagaaacttagcctcttattttctttccgtaggacagatgttgatctgtctctgagagatgagaaagctgagcttagttgaaataactgaaaattaagaattgatttgtcggggctggtgagatggctcagctggtaagagcacccgaaggtccagagttcaaatcctagcaaccacatggtggctcacaaccatccgtaacgagatctagcgccctcttctggagtgtctgaagacagctacagtgtacttacatagaataaataaataaatcttaaaaaaaaaaaaaaaaaaaaagaattgatttgtcaagccaggcgtggtggtgcacacctttaatcccagcactcgggaggcagaggcaggcggatttctgagtttgaggccagcctggactacaaagtgagttccaggacagccagggctatacagagaaaccctgtctcaaaaaaccaaaaaaaaaaaaaagaattgatttgtcacaaaaagtgtgtgtgttgggggttggggggagaggtattgattgatttgctgaagagatggcttactggttaagagcactggctgctcttccagggaacctaagctcaattcctaccacatgaaggctcacagccatctgtgatccaaatcccacttctgcccttggtgggcatcaggcacacaaatgatacacaggcttacatgagggcaaaacacctcctcatatcaataataaaataataatgatgatggtgataattaggaaatgggtttcctctcaagttaccttttcacatacacactgtggcatgcatacacacataagcaataaaaaagtaaaataaattttaaaaaggatgattgcagttattctctattctctaatcccaaccatgtcctaaagaattagttcagactagtgtgtgtgtttgtgtgtgtgtgtgtgtgtatgtgtatgtatgtgtgtgtgtgtatgtatgtatgtgtgtggtgtgtgtgtgtatgtatgtggtgtgtgtgtgtgtgtgtgtgtgtgtgtgtgtgtgtataggtgtgtggtgtgtgtgcatgtgtgtggtgtgtgtgtggtgtgtgtatgtatgtgtggtgtgtgtaagtgtgtgtgtgtgtgtgtgagacgtaatcattttaggttaaactagaatacattttagtggtttcagatcattccctggctccctctcgggattccatagttatattccataagcttctaggagaggaagagagccagagttctcccaccctgtgatttactctcaactgtgtatgtgcttcaaaatgttcttattacctggtccctcctattgtgcaagcactgaggcaaagcagtttaatgtaagcactccattgtattccttatatttaaagaaataagatactcacccccacacccccgtctgtctcttgtaatgattacattacaagctagaggtgctttgtgtcccccttgccctggatgggattttgtcaggcttgaacttgagcaggtcttgtctgttctgttttgaaacgctttaagtcatcctgtgctttgaagggaggagtgttgatacagatgtctcatttatggctgagcgctccaaagtcacatagttcccatatattgacagctgtgaatctgtgttaattgtcatctataccatgtattttcaaggaaggaaggaaggaagtgagggaggaaggggaagatgttttgttttagatgtat

SEQ ID NO: 35158 - DNA, 2900 bp, Mus musculus
gaggcctggggtttttcccgaagcaaccaggctggggttagcgtgccgaggccatgtggccccagcacccggcacgatctggcttggcggcgccgcgttgccctgcctccctaactagggtgaggccatcccgtccggcaccagttgcgtgcgtggaaagatggccgctcccgggccctgttgcaaggagctcaaaatggaggacgcggcagcccggtggagcgggcgggtgagtcacccacacaaaggaagagggcctggtccctcaccggctgctgcttcctgtgaccccgtggtcctatcggccgcaatagtcacctcgggcttttgagcacggctagtcgcggcggggggaggggatgtaatggcgttggagtttgttcacatttggtgggtggagactagtcaggccagcctggcgctggaagtcatttttggaatttgtccccttgagttttgagcggagctaattctcgggcttcttagcggttcaaaggtatcttttaaacccttttttaggtgttgtgaaaaccaccgctaattcaaagcaaaaatgggaaaggaaaagactcacatcaacatcgtcgtaatcggacacgtagattccggcaagtccaccacaaccggccacctgatctacaaatgtggtggaatcgacaagcgaaccatcgaaaagtttgagaaggaggctgctgaggcaagtataaggcaaaaggagggatgggaattctttaagcagggagtagaacctaggtcttgggtgtactaattagaagtcactttgcagatgggaaagggctccttcaagtacgcctgggtcttagacaaactgaaagctgagcgtgagcgtggtatcactattgacatctccctgtggaaattcgagaccagcaaatactatgtgaccatcattgatgccccaggacacagagacttcatcaaaaacatgattacaggcacatcccaggtgtgtaaaatttacccattcctgactcaggatattttttagtggggtgctttctctgagataatggtatatgattgtcttgtttcttacaggctgactgtgctgtcctgattgttgctgctggtgttggtgaatttgaagctggtatctccaagaacgggcagacccgcgagcatgctcttctggcttacaccctgggtgtgaaacagctgattgttggtgtcaacaaaatggattccaccgagccaccatacagtcagaagagatacgaggaaatcgttaaggaagtcagcacctacattaagaaaattggctacaaccctgacacagtagcatttgtgccaatttctggttggaatggtgacaacatgctggagccaagtgctaatgtaagtgacttttaaggtagttgaatggagaaagccgcaataagtaaggaggttataattgactgcctgtgttttagatgccttggttcaagggatggaaagtcacccgcaaagatggcagtgccagtggcaccacgctgctggaagctttggattgtatcctaccaccaactcgtccaactgacaagcccctgcgactgcccctccaggatgtctataaaattggaggtaagtagaatattaagtagaatgttgacgtgaatttgaagtcttatgttttgtgtattaaatacttatacaaaacaatactattttaggcattggcactgtccctgtgggccgagtggagactggtgttctcaagcctggcatggtggttacctttgctccagtcaatgtaacaactgaagtcaagtctgttgaaatgcaccatgaagctttgagtgaagctcttcctggggacaatgtgggcttcaatgtaaagaacgtgtcggtcaaagatgttagacgaggcaatgttgctggtgacagcaaaaacgacccaccaatggaagcagctggcttcactgctcaggtgacacatttttaagataggtggctagattggttgtgtgtgcagaatcacaaggcaagacttaaatacacgctgtttttcttaggtgattatcctgaaccatccaggccaaatcagtgctggctacgctcctgttctggattgtcacacagcccacatagcatgcaagtttgctgagcttaaagaaaagatcgatcgtcgttctggtaagaagctggaagatggccccaagttcctgaagtctggcgatgctgccattgttgatatggtccctggcaagcccatgtgtgttgagagcttctctgactaccctccacttggtaagcctgatctgagtctgctacactgaacatcaagtttgtaataggaaatgttgcttgcatagcaaagatactgataaatggcatttttctatataggtcgctttgctgttcgtgacatgaggcagacagttgctgtgggtgtcatcaaagctgtggacaagaaggctgctggagctggcaaagtcaccaagtctgcccagaaagctcagaaggctaaatgaatattacccctaacacctgccaccccagtcttaatcagtggtggaagaacggtctcagaactgtttgtctcaattggccatttaagtttaatagtaaaagactggttaatgataacaatgcatcgtaaaaccttcagaaggaaagaatgttgtggaccattttttttgtgtgtggcagttttaagttattagttttcaaaatcagtactttttaatggaaacaacttgaccaaaaatctgtcacagaattttgagaccattaaaacaagtttaatgagaaatctgtgttggtcaatgctgaaagttaactgactgtatacaacaaaggtactggggtccccatggtatgttcttagggattgagttctggttgtctgggtctgcccagaactgagctataaacagggctgatttgggttaacttca

SEQ ID NO: 35159 - DNA, 1185 bp, Mus musculus
tggttgtgggccttcatgtggttgttgggaattgaagttttgtttttttgtttttttaaggacctctgctcactctgacccaaagatttgtttattattatacataagcacgctgtagctgacttcagatgcaccagaagagggcgtcagatctcattatgagatggttgtgaaccaccatgtagttgctgggatttgaactaaggaccttctgaaagagcagtcggtgctcttacccgctggataggttttgtttgtttgtttgtttgtttgtttgtttggtttggtttttcaagacagggtttctctgtgtagccctggctatcctagaactcattttgtagaccaggctggcctcgaactcagaaatccacctgcctctgcctgagtgctgggattaaaggcatgcgccaccacgcccagctttggatagttttatatcaacttgacacaaactatagtcatccgagaagagggaccctcaattgagaaaaagcctcctgaagatcaggctgtagccagacctgtagggcatcttcttaattagcgacctatgaaagagggcccatcgagggtgggcacacttctgggctggtgctcctgggttctcgttgttgttgctgttgtcataggttttctctgtgtagccctagctgtcatggatctcactctgaatactaggatggcctaagctgaaagatcagcctacttctgcctcctagcagagtgctgtgattaaaggcatgcgccagcacctgtcattgttgtctttcttttttattattcttctttttttcttttttttttttttcagtataaaatgaagtttatttggggtatgggaagggagattaagaaaggagtagagcagagaaagaggagatagagaaggacagagagggggagagggggggggaagagagggggagctgggggagaggggggagagggaggggttgagggggagaggctgaccagaaacacctgggcaggtaggggaggggaatggggggagtggcctgagaggtcagagagaaaagggtcagagagaggccattgtcttcctttaccctagaatttatgatcttcctgcttccctctcccaagcactaatattacaaacctgtgtcaccatacctggctctgtacactgtcttgtctatgattattacttacacaaggtgt

SEQ ID NO: 35160 - DNA, 1157 bp, Mus musculus
tctggaccgttcttcaggctacagacgggcagacgctcttccacaagaaaagctatcgtttaacagattctattggcatttctccctgttccttaaacggcccctccccccttaagataaggcttcaatgtgtagcctaggctattggcatcaggacattccaaacctatgacatcacataggccacagctggacctgcgacctccagaccggttgccaagacaacaggcaccatcttcccagcattcacttggctcaccttccacctttgtgttattttctacttaaataaggagaacgccccttcctcgcgctctctccccttcttttctttccgctgccaccttgcccttttcccctctcaatagacctcccgtggaactttttggccttgtgtggagctgccgctgccgataccagcattggtgctgtgactttggtggtcgttacacaggggagctgtagaacccgggcggccgccggcgccaccgccaccggtgcgaccataacactgccaccgcctgcagccactgctacaccatgtggactccatctgctagcacctgccataatctcccgcgtggatttccattgcttcgagactcacaggtttctaccacgtgggatgtgcctccgtggactaccacgtggaactggcctctggccagccaaccaaagggttccacacttcctgctaccggactgcagaatcctgcaaacacacaccggcatactggttggtaaggagtttctccagttagtgggaggaaccctctatgcccagatagcgcccagccagcctcttttgggctaagggttggctttcaatgccctggtccttatgaccggcctcctgactgacctacgagttaggatataggcccgtgggtgaacccccttctcgaaggcaattcataaatcccttgagctcttgcagcggccagaaaattcctagtactaggttggattgctttctgacgtttccgggaaacgtcaccgccgtggtccctagaaattctcctgacgacctgaatttctagcttggccgtactatcaaccagtgttgctgggcagtcctctgggacgccggtacggattgctcagtaactaccctcccacccaatggctgcctcttggaaaatttcaaatctctgaaa

SEQ ID NO: 35161 - DNA, 1235 bp, Mus musculus
atttgctatgtacacaaggctggcctggaatccacagaaatggccctttgtgccttcctagtgttggggtttaaaatgtgggtcaaccttagaccggagaaaaaaactatttcgacgactgtctgattaaagcaagctgtgtttagactgtgcactttccctaagttcgggtctcagaacatcccctcactggcttttgaggtctcttatatgtggaagggttagggttgatagagaagagctgttgagataattggctgttagcccctggacatagaagttggggtggggacatggtggtggaggagaggggctactcaggacctaaggcagtctgtggggtgtggaagggcactcatcaaggtatctggaaaaacatttccgtaaggcaaaagggcaatcatagcttacagattcaggggtttagcaaggcaaagggatttacaaagggtatatacatcatggggttacaagttaagcacaggttgaaaaacatggtttgtagaatacattattaggcttaggaaacaaatttattcttgtaaggtatggagacttaataacaacgtggctctttaacaacattgtggctccaggtttggtttcaaagtcaccacacttggccagaattgcggttaggagctaacattgccttttagaacaaaaactgagaagcaagggtcaggaaagtctttttgcctcgtgaccctgctgcctccagcggccagaggcgggagcgcgggcgggtgacgccaggggctccccagcccgcagtgactttccatcgagcccttttaaatgcctttcttttgcacgtggtttctgtgagtcatctcctttctccagacaaagaaatctaggttttgctaatcgggtttcctgagtccgctaaggcatgagtcaaactcgtgcttcccgagtgctgtaagctcttcttgctcctcccccaggggaaacgcccgctgccgtggggcaaatccgagtttctggggggccggggggggggtgtcaaaaaattcacgcggaaggtgagtgcggcatggaacctgtcgtaagtcccaagcgtcagaagagaagagcgtttgtgtgttttaaaaatagttctcttaaaaatctttggacaggctcggtggctccaagggtaaaggagcttctatcaagcctgaagacctgggttcagtcccttgggaaggcggaaaccgaaaaccggtttcaataagctgtcttctgacctt

SEQ ID NO: 35162 - DNA, 2301 bp, Mus musculus
tatggatgacttatgaaaatatatgatggatataaaaattagccatattgattatatcaatattgtaactgctaaaatgacattctaatgtctgctttttattgggacaggccatgtgatgcatagagcctctttcctatgaaatgcgtctactgcttaaactgttgatgctgtgttgataacatattgacatgatgctgtatatgtgtgcctactgtgtgatgaaagggattatgagatgtatgagtgtaatgacttgctaacctttgaaaatttggttacagttcagatagaagaaagactataaataaaacacttcatcattttcatgtgtcgtgtgtaaaggcttaaagtccctccttgttgaggtggttcatatgttcagttgctctattatgattctccgataatgacgttgacttcacactttagcttgtacaacatagaaattaatatctaaagaggtcagtgggtcttggctagaattttaaatttcttctcatttgagtaaaatgttgcattctgaagtcccatgctacctgaagttgcatttggagtcccaagctactggaatgtttatatgtgaccgtttcccaggaggcttacactgcagaaggaagaatgaatctaggtgaggtgggcagctgcttggcagtcctctcctgtgccccaactgtaaaccagatagaaatgttcaggggaggatactttcattattgtggtttgtagtgttaagatgattgcttctgccttggaaatacctcaagctgttcttatttaacaggtaagtgactgagtataatattccagaaaaatttgaaatcctaatttcttccatatttcattaaattttttgcatacaggtctaacaaatatggatatgtatacacatcctctttaatgaaggtattattttggttacttttcctaagatataccttaaaagatgttctatacatttcctacttaaattctgggggatttggagtatgtacatgataaaaaagattataatatatcgattgaagttactttattttctaactagaattattttaatagtcctttattgaataagtgctgtaatttgtttgctatgagacttattcctgatgtgaatgtaaattatttttccacatgcatgaaaaaatgtatgtactaatcagagttgtctccactgcattgaaattacttgttttgaactaaagtaactcatatttatgtagtagaatgcttatgttttcagactttgtaatgatttcctttggatgtattttaaatcaatcggtctgggtaacatatcagtttagattaatatgtgcttaaaagaagaaaaaaattcaatggttcatagtagaaatgtgccacacttaaataagctctgtatgacatgaaattctgttaaaacattgtaattcatggtgacttttaacttataaaaatactacttgcacgggttacttgatttatggatatatgaaaacttctcaggacgaaagttcttctttctctagaactattcttctgtcggtcatgcagaatgctgttattctgaaaagtgtccctgttgcatatgatggtcactttatttggggggattcttcataagatgtgagatgttgatgccagtctttcccaagtaagtgctcgtaaaaaaggactactaactagcctgcatctgtctctaactgggaccaaggggtctgctgaaggaaactgaagagctctaacattttcacagcttggagaagatagaatctttaaaagtacaactgaagcttgatctattttacaagtgcattgatggcccctgtccttctctggttcctgtcatttgaaaccaactcctgttgtaaataggaagaatatgggacattcatatttaagaaaatttgatgtcattaggtgactaagtagaaggcttagaaaaatgtattcatttgcaagtattttggcacaagaaattttccaactgaatagtaagcaaaagctaagttgtttcattgaaatcataaggcagtttaagataaactggagaagataactgttctaatagaggataatcgaattgattgtcaagtggatgttatttattggatagtgacagagtttatttgtaaccttaattatattaaaagttattctgttaggatgttttgtattaataaacgtgaacaaaattaatcgtgctgtttatgtgtcttactaaaataacagtgcccattttttcatgttaacggttaatattcagttctatccagtcttagtccacgttttaacttgtccatgtgtacatttgaa

SEQ ID NO: 35163 - DNA, 1218 bp, Mus musculus
cgccgggtctaacctgcaccccgagggcagcggctagcctgggagcttttaaccacagggcagtgttaaccaccacctctccccctgcctccttggatcggccagtttcaaccaagcttaggtctgaaactttccacgaacgcttaagaaagacgcggacgaagtctgctcctcacccactaggcacccatcgagaatatggaggtgggagcgagcccaagccttcggcgcgcccctcgcaggccgccctgggcctcggctcgctgcgctaccaccgcgccgcctcgcgccggcctgcccgagccttggcccgggcggacccgaagtcggcgcgcctgcagcgcgttcccagcgggccatcggccgtccgggcccccgtggcccccgcggccccaagcccacccggagcagagagctgagtatcacggcccgggggtgggagacaccccggtgtcggcgaatttcgcccccgactctcccccgagggagacccgagcgtacctttcaggaaaagagccccagcgctgccaccgctcttgcccgccgccatcttcctccttccacgccgcctccttcttactccatggccgacaccggcgcggtgctggcggggaatgggggccgcgcgtcgggagggtagcagccgcagggtggcgggcctcgggctcgacctccgcgaggggcgctccccgccggccgggccccccacacaaaagcgggcctgacgggaggcggcgaggcccacggcctgggctgcttctcctcaggcgcctaccggggaccgtgagcggcggcggcggcgcttcccgggcccggctcccctcggcacacgactccccatccaccgggccgcgccggcctctgaggagctccctccgctcccctccgccccgctccgccgctggctccggaggacggagaacggagcgaacgctcacacgccttctacgtcccgggccgtaaaatggccgcagcggcttgagccgagcgagggctccgcgaccgtgaggcgcccgcgacccctcgctgctccagcagtggccgccgccgcccgcccaccccgcccaggcgtcagagcatcagcccaggcctcggcgactgtccatgtggacgggggtgggtctccgccaccgccgcgcgtcggtcgccacagcagccccgccgccgctcctcccccaccggcctccgggcccgccccgccgccgccgccgccccaga

SEQ ID NO: 35164 - DNA, 1150 bp, Mus musculus
tataagagcaaacacactttttgtttgtttgtttgtttatttatttatttatttattttaattaatttttttaaagttctgtgacctgggttttaaaggattttgaagtccaaagtctagtcattgaaagttcctctcggttttattccttcaaaaagcaaagtgatttgtattttacaaaatgggtgtagatgaagaacagtgtatttgaaagactactatggcagagtcccaccatttactaatgatttattattaaggacaggaaggcggataaatgaatccctatgtgatggcctctgcctgcagtcttagcactccggatccagctgaggcagaaaaaatgccatggatttgaggacatctgggctagtgagtttaaggctagtcagggttactggccctaggttctatccccagcacctctccacccctagcaaacaggcttaggtttgttcagtagcacagctatgtgaactaagtgtgagaatatcccagagcagagctgtgctgtgctgtgctgcacgggcacttaactgtgagtgtgcttcagaggccccgagcacagtggtgaggcctaaagagaaaaggattgtcttttctgatttctcttaaatgttgttgttttcttaagtcttaatttgaaatctaaaaaatgttgccagtttggtagttcacagaatagtttttggagagtattggggcttttattttattttactttattttttaagtcagacctacatgatcgtaattagtagtttttaaggaagtttattactttttaaaaaaaatctgaaaagggcatgaaggaggattgttaaatattacatcagttttatatcattggggcagatgattgactttctcattcttactgctattctaaaagttctttctgtattaaagatagactcacgcactacagtgctaaggaaggtaatagaaaaatgaactgcaggtctgtgtctgttttcattgcagcttcactctatttaagcagacttaaaacctagcacattttatagtttttgttttatttataatttcattttctgatcaaaaaaattttttagctttctttaaaggattgattaaaaacaaaaaacaaaaaacctgccgggcagtggtggcccacacctttaatccc

SEQ ID NO: 35165 - DNA, 1158 bp, Mus musculus
ttcatgtcacttaagctggtgtactgcttcggacagctctcttgcccctttccctcttccgggcatctattttggccttggagagtggtagagctgctttgtaaactttgtaattccagagcccttgtacttagacacagtttgtttcacactgcaggaaacctttaaaacactccctttgtgtgctgtttactcctgatcagatgtcagcagctgggctaatatttacaactttaatattaggaatttagagacaaagatacatcaaggagttatgttgacacccaaaggagtctttgtattttagaatacaagtaggaagtaaaactattcttcacactcccctttgttttaaaataccctgatctttgaaatttcaggatttttccccttagattcatgctcagaagccttgggtactattgtcagaattgctcctttcaaagtgtcttagtactgaagtacttatttattatgatggcattgtggaaatgattgttttgtgttaaggaaattaagtggccttgtctctactaataattgaaaatgtgaatgaggttttcttatggaggctgtcttactgcttagacttaccctctgttggtcctgtgattgatggcagaggtgtagttactgaaataaacaacctgttcttcctctttcatcgctcacttttgattggtgtctttatttgtgcaggatactgagtaagttttatttcctagtcaaaatgaatatagtccttggggggtggatctagtggcctaatgaatttagtggcgtgtcagcttagcattgttctctgaagcgcttgtatgtgacctctggatctgtgaataagcactagatgaaaaatcagtccaaaagtgggatttatgataatgacatcttaatattttaaagaatttatagggaatgaacaatagcaaagcattgttgaacgtgtgggttttgactgataacgctgtcatctccaacccttcccttcctaattatgtcaccgtgctggcctacagtgtagacgttcagatcgtctcctgagttaactttgccaagcaggagacctgtcctcattcaggcaggcttggggttctgcatgtcatagcacccagagcctcccaggggaactttagagcatcatttttggagacacagcag

SEQ ID NO: 35166 - DNA, 1128 bp, Mus musculus
ttttgctcttagttcctaactctggaccctaatttaaaatgtaattttcttctagcatacgaggtatttgtagatatatgggctcttggtatcagtttctgtttggtagagacatcagacccgtgtctcatgtgtttggtatagttttacaaggtccacctatgaatatggtcctcccaatagccaagttcccaaattccccattaaattttcttgttttacaacacaatatcttcttttaaacttttagacaaatgtacatactctatacatattttttaatcatctagagactatcacagtgttggattatgcctgtgctttctaaccatagagttgacaatggagtcattgacaactttgcattgattcatgattgtcacatggatctttaggtattagcgcagagacagctaatcagtcaaggtctacaaactgcactgatttggatttgacaaatctccctgtcagaatgagttctgatatattactttctgtaacactacttccatctagatttttaccagttagatctgtgtagtataggtgatagctgctgcctcagaaagatttcagtgttaatatatgtttcttcaattaatcataaaacgtactagaaacacttttcatttctattccccagtagggaactaactgattatgttttcaaatatcagtagctataattaggcagtatttactcatattcataaattgataatttagtcaatttatttatggcataaatgagttatccattcaattataaaaggcaggttttacccttgggaatgcttagggacatcaacagacacatgacctttagccttatattgctccctggaagaatcaatgggtggcatgtcgtcccttatcaaaatctatatacctgtcaattttttcctcagtaatatccagatcttcattttcaaaacaagcccactattaaataatcccaggggttttgactagttaagtcctagggcacagagtttcctatctactcctttgtctgcacgtgtcatgctccttttaaaaattattgttatattgaatgaaataaggcagaaatgttttactaacctgcataataacttccactttagtatattacaagttgaactgcat

SEQ ID NO: 35167 - DNA, 1135 bp, Mus musculus
gatgaagtacaaaatgaaatagacagacttaatgaacaagccagtgaggaaattttgaaagtagaacaaaaatataacaaactccgccaaccattttttcagaagaggtcagaattgatcgccaaaatcccaaatttttgggtaacaacatttgtcaaccatccacaagtgtctgcactgcttggggaggaggacgaggaggctctgcattatttgaccagagttgaagtgacagaatttgaagacattaaatcaggttacagaatagatttttattttgatgaaaatccttactttgaaaataaagttctctccaaagaatttcatctgaacgagagtggtgacccgtcttcaaagtccaccgaaatcaaatggaaatctggaaaggatttgacaaaacgctcaagtcaaacgcaaaataaggccagcaggaagaggcagcacgaagagccagagagcttctttacctggtttactgaccattctgacgcaggtgctgatgagttaggagaggtcatcaaagatgacatctggccaaatcccttgcagtactacctggttcccgacatggatgatgaagaaggagaggcagaagatgatgatgacgacgacgaagaggaggaggggctggaagatattgatgaagaaggagatgaggatgaaggtgaagaagatgacgatgaggatgaaggggaggaaggagaggaggacgaaggcgaggatgattagcacagaagactgatggattccaaccttcttttttattttctttttattttttaattttctccagtccctgggagcaagttgcagtcctttcctccctgtccctctgtgctcagtcgccctgttttgaggtctcaacatcatggttctcaattaatttggggggaagtatcttgagcaaaatacaacaggaaaagaaaaaaaaaaaaaaaagaaacttcaaggactgagtctgtatcttactcgctattgtgtagtaaggtttggacctcacaataccagcattctaatttttacttggtttttctgttattgtcggttctcatatccatggttgagggagcttgtgatggggctgggagatggctcagtgggcaaagtgcttgcctggatgaggatgtgagttcct

SEQ ID NO: 35168 - DNA, 1110 bp, Mus musculus
tccctaagcctacagaaaatttcagtattcttttcatatttagggttatgcttagctttgggtatattgtattactgatttttaaatgtcccaatattaataggttcttgaaattaaggctatattagaaattaaaaatctgtgatgattcttaatttaattttggattctagattccaatatttatatttaaaaatattggatatttaatgaacagagttcatggtgataactttggaaaatgtacagtatagtctcattctcattatcaaagcaaaaataaaattaaatagccaagccaaatgcggcggttcaacaagtgcatttctgaccgtctgcaggcagtgtccgtctgctgacatgactggtaaaggctgagacttcttcttcttaatataatgagcttgtctgaaaagagcagggagtaaaaaaggtagttgggaagtgtgtggcggtgacatacaatgtcatcattctggcacttcaggtgaaaggaattagaagacagggaagtggaagacagtgaaggagaaggctgataaaagactcctggctagcctactgcctggatcccgagtacaaatcagaagcaggagaggctgacctgatccccgaggaagggcccgcatctcagaggccctcatgggtgccgtggctcgacatcagtttggcatcaacctttaaggtcaacattctttttctgtcctccacggagtcctcatttatacatctgccttttggttctagtgtttaatttttttcaactgccctgaatctatatttccctgctactttttgggagtcatctataaatctttccttgtttcatccataactgtttcattgtctcctcatttaacaatgtggagatcagggtaaggaacttatatagaattaaataaacaattccaaatgctgtgggctcctctggaatcctcaacaatgatttgtttgtttgtttgtttgtttgttttaacactaaggcatttccttaaattagcatcagttagaaacttgttggaaaagaaaaattctcagatcctacctgaaaactgaataagactctcgggagacccagcaactgtaacttaacgctcttttaggtggtca

SEQ ID NO: 35169 - DNA, 1745 bp, Mus musculus
tggagacaggaacatccaagagttcaaagttaacctttaatggcaaaccaagttcaagactagggctataaaagcagcaataccaaaaagcctcagtttatatttctaatattcaaccatattgttatactatcctgacttcacgaagcccaagtttagtagaagtttcagtgttgtcacaggagtagtttaaagactcagtctaattgcagtctcccagcctttggaagtagagatgtagcatccaaaggtctcacccctcacagtctctctagagaggtctttgtcttctgcataaacagataattaagggccttatttccattgttgttttgcagtgtttcactacaactaaaggttggtgggttactaaagaattgtcatactctaattagatagctatggaacatttgtcagatagttaggccacatcggagatacatgattgattgactggaagcagtttcacttgaaaatgacttacgtaggacagtgaacagcaaacattctcatacataatcattaacagaactgcctcttggctgtagtgtagtagactaactggaaccttcaagggttattgagataaagttcagccctgcatgatgttagcagcgttcacacagttagtttcagttgacagtgttttattttgacattccattttgtatcatcatagctatctataagcttctctccaatgtaagttaaaagtatgtggtttcaagctttctatctaagaaaacaaactgattttaatattttgtttgcgtgaagtttatttttgagtaggttgaaaggaccaagatacttgagttactaaagggctattaccaatgttcatcctatatgcaggaggtgtacagtattttaaaagtgaatagggtggagattgcttttatttagaatgcattagccccatattatccagaagatactgctaacagtagtagcttaattaggcagtaagttgtcttaggttaaaaattgggaaaagtacaccttttgtttccatccaaaaaaatgatttttagatgacttcaactaaaattaatgcatctactaagaaactattttgtttttaattataattatcaaaatgatccaaatgaaaagacattctcaactatgtacagtactccaggaggaggtctaattgagtcagaagactgtaagtaccactttgagcgctctggagatcaacccacacaagtacagtgagtagattatctgagctataaatatattttttagtttcaatagctctgttttgaaatacttttttaatgcagataaaaaaaatcaggaaattaaccttatatggcacaaaccaaatacatagtagtatatggatgagtttctacatttaaagaactaagaagataggttcaggattgtattatagtacatgcacttacatgcagatacacatgctgattactttcaaggatgtgtgtgttggtttatcacaacaataaatttaaaagtaagatacaatgttacatttttagaccatattgaaacagcaagaagagacaggtcttaaaaagttattaagaaaactacttaatcccaccatgggatatttagaggtctaaatatagctcaattttaaaaagcaactgacctaaagggttaatgttgtaactgacacatttcaaattaaaattatgtttattttgtacagaaagcaatgttaaacacaagcagatctgttgtatgtaataagtgacagagtttttaaa

SEQ ID NO: 35170 - DNA, 1112 bp, Mus musculus
ttacccaggtataaattcttttttcaggattttttagatagtagtagaataaaaataattttaaaatgtcatactttatagtttaattttaaggaaaagattggttattttcaattattaaaagttaaaaataggccaaatcactttttatgcaatcatgttttatacagtggtctcattgcacattgtgttttttctgcactttttacggtatccttatcaagctggtatctcaatatacactctaaagagaatctctcatttaatgattgtgccttgtattctattattttttgcatcattagtaaaattaagttgtctattgtaaatgataactatatgacttaggggaatgtatttctatatgtactgctgtgggaaaaggaaagcagttatttatttgtttatggtacattagttattttatatcttgaaaaccaacataaatgccatttctattgtttaaaattacttttttttttttggtaagttttaagaatgtagtattttctgagaactgatatggtacaaagatgtaaccaaatctttcagatactacatttttaaaaaggaaggatggggaaaatatatatcagcatgaccctgatgtagagaataaagtctttaattgaaccttggcaaaatatgtaattagattataattgtttccttgtttccaatacggataaatgttaactgtcagtcttgaagaagaatgaaaagtaatgcatttgggctttttagatcatttataatgaaatttgtacagaaaccctccagtgaaactaagtgaaccattttccagaccttgactggattgctgtgattttacagttaaaaaataatttcaaaatttttaggttttttgtacatttatttttttctaacaaatatattgaactatataattaaaattaagtagttactcttcataatgcagaaacggatgatgttatagaaaaatgagtcgatttcaccattactgaaaatgatagtgtgtacattggaaatttaagtcattaaagtaattagttacttttgaagggaatctatttgagaaatgtaatttcctgatgttatctgcattgtagtagaaaattagactaaaatcc

SEQ ID NO: 35171 - DNA, 1099 bp, Mus musculus
tctgtcttaagaatttttccccaggggacaataagataggtgagcaggtaactgtgcctatccttccggcaacctcattcctatcctaagaacccgtgttaggctaggagagagctccctcctcctcatccacgtgaacacctaacaaataagtcaatcagcaaataattttgaaaataaaaaatgtttaggtaatcgcagaaatttgtcaaatttctttctattactctgtcattacatagaagtatgctagtcccgttaccaactagttggaggactagacaataacaaaaagcccgttatatattaagtgtactgtttttcttttccaggagagtgtaagaacaatgttcttataccaggaaccattcaagtaaatggccatggaggacaaccatcaaaactcgtgaagagaggacctgggaggaagcccaaggtagaagttaacaccagcagtggtgaagtgacacacaagaaaagaggtagaaagcccaagaatctgcagtgtgcaaagcaggaaaactctgagcaaaataacatgcatcccatcagggctgacgtgcttccttcttcaacatgcaacttcctttctgaaactaatgctgtcaaggaggatttgttacagaaaaagagtcgtggaggcagaaaacccaaaaggaagatgaaaactcacaacctagattcagaactcatagttcctacaaatgttaaagtgttaaggagaagtaaccggaaaaaaacagatgatcctatagatgaggaagaggagtttgaagaactcaaaggctctgagcctcacatgagaactagaaatcagggtcgaaggacagctttctataatgaggatgactcggaggaagaacagagacagctgttgttcgaggacacctccttgacatttggaacttctagtagaggacgagtccgaaagttgactgaaaaagcaaaggctaatttaattggttggtaacttgaagcaaaatattgcattttaaaaaatctgtaacgcaggtacagttaaggagtaagtagaactaaggtctctgcttccttgctgctatgacggattagggaatgttacaatttgacttgggaaaat

SEQ ID NO: 35172 - DNA, 1228 bp, Mus musculus
tttatatatgtttactggtttcaaaaaccaagtctttttctctgaatagtgattttttagctgttgtcataattttagctgaaggtcagtgattgtaaacttgttcattacactttcagcttttaatagtttccccagattaccatgtaccattgcaaaataacatattaggaaccatatttgttttacaattaaattacatattattattgctgtaattcatgttcctttataagattggaggtagtggtgattgtagatggtaggtgtagaccattgatgactgtgatttactacctatatctatgtctcttgtttgtagctacacaatccttaattagtgcatgatttaataaaataaagaatttcagaacaagaacagtactattagttttcaatgtctaaactgtagttgttgatatgtggaggtgacactttttttatattaacattttgaattattacttatgggattaattctatcaatgtttctattctaatttcaagggttctgatgattgtcttgtgaaaatctgggccacagacgatggaagattgctagctactttaagaggacatgctgctgaaatatcagacatggctgtaaactatgagaatactatgatagcagctggaagttgtgataaaatgattcgtgtctggtgtcttcgaacctgtgcacctttggctgttcttcagggacatagtgcatctattacatcactacaggtagctgttgtaaattgtattaaaccttttatattttaagaatttaattatgtgttaggatgtcacttttgtggtgtaatagctaaggtttaaaacagaagagtacttttttaagaactgtatgaactcgcagtgccatggccattgtgcctttgttagcgtagtgtttgtggtcactgttagcttctgtgagtttggttttattatttggactgcctctgttcttgtaaagaatgtttcccctatgattgcttttcagttctcaccattgtgcagtggctcaaagagatacctgtcttctacaggggcggacggcactatttgcttttggctttgggatgctggaacccttaaaataaagtcagttgcgtttttactttataaaatacatgcttaatggttgaaagtgtaaaaaacatcaaatcaacaaagagaaacatttaatttttttcttgtataaataatgaaaataagcttagaattttaaaatctgatcttt

SEQ ID NO: 35173 - DNA, 1201 bp, Mus musculus
ggatttttgttttttgattttccttaaaaaacattctgtgagacatggtatttgagtattattagttgatgaagaaaaatcaccactatccaaatttaactgcttttgtaaggaaatctttaaaaagtatagaatgcactctggctaaagagtaaagatgtttgagttttaattctagtttcatgctgtattttgactttggacatactatttagctgcatttgattatttatgagaacaatgaggaaagtacagttatttcaaggaacttaattatttgtattgtttattttgaaaactttaaactaggagccatatagaagtcatcctttttttttccttttcctttttctttttttaaaaccagcatgtgataaatgaaaaaaaaaaatgagttctagaagtctgaatttaagaaacctattttgttctggagtccatttatattcccccattttcttggtagcggatactctgttttcaaggaagctgaatgggaaatacagacttgaacgacttgttccaactgcagtttatcagcacatgaagatgcataagcgaattcttggacacttatcatcggtgtactgtgtaacttttgatcgaactggcaggcggatatttactgtaagtcatttttaaagtcttacctttactgatagaattgaagaaacagtgtctgtatgagaacttgaagtaaaaattttttcttttaatgataaaatttaaatttgggtaattttaaaagcatgctctaacaagtttctgcttaaatttgaactttttccaagttctaaatttagtcctgttatagtgtaatcacagtaacattatgtcctatgtcctgcacacacaaattcctcactattatatcaaattggctggtggggctttcataaaatgcgatgtagttttcagtctagactgaacatgggcaaattgtagaacagtatttattatctgcagagaaccacttgctagcctcagagagttctctttaaacagtgatgggaatcttgtgcatagctgacagtcttttctcaggattttgtcacccttgacactgaattctttaaaatacctgatgattttaaagagttgctttgagagttgcttgcatttggtttctcctaacctacagggaaaaggagcaggacttttcagctttaagtgagaaaaatattttgaaagtattttgaat

SEQ ID NO: 35174 - DNA, 1221 bp, Mus musculus
cttgacttatgaagctttttgtgtaattcttgggattatcattacttcctgtctgaaatttcagctgctttgcttctcttttttagttaatattaatcttttacagtatttactaaatctgttggttttaagtagaacaactaaacaacaaatctgcacatgtgaggagttcctggtcgctcttgagtatcctagtccttttactcacatacgtaaagtaaggaggaaagtcaggagtatttccatctctgttccccattacctctcttcatgattattaaatgattttgggattgtccttctaatactgttggagctgctgttcattatgtgatttgtcttgttctactctaggtggtgctgtagatacgaaccaaatcatgttaatgttttccacatgctgtctggccttaatgtctttcttaacagtaacctcagaataatttgtatgtgtatagtgatttagttgtttccttttaaatctttcttaatagaactatctctgacacttaactcactgagccaacccttccgagagtttttataaataaaacttaaatggaaggccttttagtttatcttctggcttacaaactagactctgtgatgggtaaaattcttttgttgttgcttttgtttttgagacatggtgtcctaatggagccctacgctagccttacacttgaactcctctgccttagtctcatgaacactgagattacaggtacagtccactttgcccaacaatatataaatcctttatatcagtttttagtccatttaaaattggcagtgggcattttctggagaataatatactttcatattctttaagatgtgtactttgtatgctttttataattaaagttaaatttcttgactctgaaatcttattttctatcaagctttaaatttaagctaaaaaaatgaatgcaattggttatataatagtgtgggatatttccttttagtcttgtttcctaatgttatactccggcaccatattgttgggatcattaaaatttacttttaagttttcttactgatgaggcctctagtctgttatgataaagatgacaaaaatatataccaagagtattgtgtagtgtctagaatgttggagagcactcagtacatattggccactatcacccattatttaaagatctgctgtgctgacatttttcagcattactgaacttcatctgctagtattttact

SEQ ID NO: 35175 - DNA, 1177 bp, Mus musculus
ctaaatatggcacaattaaacaaatagtgccgtaccataaagccacattgctaagaatgcttttttgttttgaaatgaacccaaaggagagttgttgcgtactatttttctgttttacagctaggtctcaccaaactagcacattggaagtttcacttcactggaatcttcctcgtttcttttccctctatttttgatccaacatcagtgagcccaagtattgtttttctactaatggctaagtggaaattgagggtctgcagtaggattagagacctcaggtggcagacagcagtgggacttaggagctgtgtccttgtctgaggtgacagagccaagccactcttgaatggtgatggcaataaagttgggacttccttccttgtgagaatatccccgggcactgaagtatacactggacagttactcctgaggagtaatcactactcctcagttgcaggcctgcagccactcactgctgttctgctggccacttgcgtggatcacggtagagcacaggagacacggttgccttcatggcatccctccccgtggctgtaggaggctcgggcgctctgtccttcctctcctcttctgtacactcagtattctggtgaccaggtggaagattctctaccaaatacaggcaggagaagaaatgacaggccaacacagaataattttcaactcaattatgtttccggagtgatatgtttggaaattttaatacatatttttaagatttgaacttgtgctccaactcaggagacagcagtgtgatactcttgggtttacaggacagatgctgatgcagcctcacaaagaaggttcccgcctggctgaggagatgcaatagtttcctgttgaaaggcacaggtctccttccactcagttcaggacagctgcaggggcatttactgacttggtctggtctgttggagcagtactcaatcagctgaggagaaacactgtatgttacatgggtgactggagcagtgtgtccatttgttcatagtgtgcatcttacgcaaggcatacatactgattgggggaaagggttgccatggtacttgataagaccttccctggtcggtcctgattcacagccgtattgctgtcatcctcctggattgggttgttgtcatatttttggtaacagactcttcttaaagtgcta

SEQ ID NO: 35176 - DNA, 1219 bp, Mus musculus
agccaagtaggtcagaatcctaactctttcaagagacagatggggtggccacggctcaacagctccccagcaaactgaaagtggctgattttcttcggattattccttcctccttaacaaagaggaatatccttgaacatcaactgaatgaataccattggggacgtcattggaccaacattcgtttaaatgggtctccatgtcatcttaaccactcactattcagtgttgctacagctcagttctgaggcctgaccctcacctcatcagcccaccctaacaggctgccacataggaggaccctggcaagtgacaaggcaatgtcaacaattagaacgctcttccttacgaagaggggaaatcagtcgctatgtaatgtccatcaggctagtactgcaccaagaaacgcccctccaccccaaagtgtttctcctcttccatgcagcagtcctttgaacaatgaagtgacatttttttcttagtctgatcatttctttaaaaaaaagcattacactttccgatccgccatcgtgggtggagccgccgccacgatgcagatctttgtgaagacccttacggggaaaaccatcacgctcgaggttgaaccctcggacactatagaaaatgtaaaggccaagatccaggataaggaaggaattcctcctgatcagcagaggctgatctttgctggtaagcagctggaagatggccggactttgtctgactacaacattcaaaaggagtccacccttcatctggtgttgagacttcggggtggtgctaagaaaaggaagaagaagtcttacaccactcccaagaagaacaagcataagaggaagaaggttaagttggctgtgctgaaatactataaggtggatgaaaatggcaaaattagccgacttcgtcgagagtgtccttctgatgagtgtggtgctggagttttcatgggaagccactttgacaggcattactgtggcaagtgttgtctgacttactgcttcaacaaaccagaagacaagtagttgtgtatgcgttaataaaaagaaggaactcgtaaaaaaaaaagcattacattattacattattattacatgtatgtgttacacgtgtacaagcacatgtgccacgagcacatgtgggggtcagaggacaacctgtataagtcggttctcccctttggccacatgggtccctaggattgaactcaggtcatcagatt

SEQ ID NO: 35177 - DNA, 2943 bp, Mus musculus
gatatattttaagaagtgcaccggttacatatagtaagttaatagagtttgctctgtcagtatgcaaaggcgttttcagctcttgtagtttgcttacacacacatgcacatatatttttaaatgcagctccccaaagtaacagctgcttgttctattttgtgaagggattatatttttggaggaagaaaatgcttggttagatatattttgtgaaccgttggcgccagccctgcgaggacatttgcatagcacacacaggttctgcattcagctccagcatactgggaaggaaaaagagacaccacgatggctgcctagtgtcacttcccatgtcacgcacctttgtctctgacagttgacagtcttaggcttttcagaataacacagacacacattcttgcttgatgtaggagcacgtgtgagatttcagagcagcccagacaggaaggggctgtctagagcatggtcctcaatggttcttaagaagcaaagtccctgctccctctgggtgaacactggcaaacactgaggttactctcctgtatcctggcatatttagagttaatctcacacatagaaataatcttgaataggataaagggctgactgaaatctccacctagcctgcacgatgctaggcctttcactctgattctgaaaaggaaatgtttgagaaattgaaagatccatcaagcagccctctctgccacctgcaccccaagctttgctaaaggtgggctgttctgcagtcttttttaaatgctgaagctgagagcttgttgcagtcctgttgcaacaaggagaaaggcgaacacctttctttatgaatggaccaaatgattgatgcacaattttcttcccagggaaagcttgtcaggttgtgggcattagtgggctagttggtgttaagcccgatccacgtaaaattccatttgataaatcccagggagtttccagagttttgtgtgttgtgttgtgttttgttttgctttgtttccacctccagctggatattgtgcttgaatttgtgagtcttctgacaagacacatttctctttaaaatagagtgatttttaaattgtcttgtgaaatcaacccaggttaccttgagccgtttacttacatcaagtctactcttgccagtgtgtgccaacaaccagtttggcaaagtgaaatcttagcatgttttggatggtaggagcactaaccttacagtgttgaggagacaaagaaagctaccaagatttgtcacatatctttttaattgtccataccatacctactatgactgtgttagacacaccaccgaatagatggtgttcttagcatcactatcatagtttcacatcatttccttgccatggttcttctagggagcactggggagtcagccaagaaaaatgagattagaggtagtgacttgttttagtgtccagaagcccagtatggagtggaccacagtccccggacaagtgtgtgtagagcatgctggctcttgtatgattcccagtctgcctgtctgcctgacttctcttcctttccctctttctctttgttgttgtttgagacagtcttgctacggagacccaggactcacttctgcttctgcctcccaaatgctaggatcacatacttactgaaatcgtgttcttccaatttcctttaattagcttgcttttagattggctcgccgccatctctaaagcctaggaaagaagtgcagacttggctgtaatgccagcagctttcaggccatagtgtcgacttcctgcctgcttgtggacaaaggaagtatgctgctgatgcccagacagtgccatttgaatattaggtgaccgtgaaacaccatactgccaagtgtctgcaaaccagaagacagtttagttcaggaaatattttgccaaattcaggggctttattaaaatcaaagaggagaaagaggaaatattttgtccttagatgctaatatgttttaggctttctttttctgttttataaagttaacccagtatttacatttccatattgtgtgaattgaaccatctaaatatatttttcttttgttattgaaaggtaccaaaggctttttatgttttgtttggtttgtttgattttattgtagggtttgtttttttttttctagaaataccttttatatagactagtccccaagtgtctgggtctacttcagtctgtgtaattggtttttacctcagttcatttgtatttgtctctcaaggcattggtgaaatctcagattttatattctgctttaaaggggaataaattccagaaaacatgcattataaagctggagttgtttcttcccattctctctccttttccaacttttatcctggagttagcttggatccttcctgttgctctaggaagctgagtgtctgctcccatccgtgaaagggttagtgagttgctacagagctcccacagtgacacatgagaagaatgcatgtggttttgtctggacgcactgggaggagaacagagccctctctggccacccaggactgaggtggggatactcagcggttggcctaggtgtgtcatgtcctcttccaggcacactgaagccactagcggtttgtcccatactggctgcagaaaacaccagaggtggtcacaactcctctcacttgggcttcctgtgatccacatttggaagcagaagaaaacatttctgaaggcgagggctaaggctgaactcaccaagaaacagttgcagaactcaaaggccaagacagatggagggtgtgggagggctcagacacaacaagctctaagatggcagaaatatgaccgctcacaaaaccaaatcggccaagagccctgcctgcgtgtgacccagattccaaagggagggcttcctagttctagacatgtgggccagattagcattggctgtcttttctgccagcatgaat

SEQ ID NO: 35178 - DNA, 1984 bp, Mus musculus
tttacatgatcacagaaacataatttcatgaaaaaaaatttttttttcctaaatcactagttttcgattggttgcaaatcagttacctgacattttcttgttcagagacagaacaagaaaatacagttgaatttggacccatttactgacccttgtggtcaaacctttccacctctagtccgaatattcccttttggatgtaattaaatttgaaagctctgcaaaatctctgtagaatctagaggcctgttgaggacaatgttgatgttgttgttgatgatgatgatggtgttggtgaagataagaaagaataacagtaaaatcctgtcttgtgacccataggccaccacgatttacggcacaaatcactgtgggaaacaatatatctctctctatttttttgtaatgaggaaggtagcctttgaatactcctattattagcagaaatgaattatgagaattaagattattgtacgattgaaacatgaaagaaatcatgtctttgttagcaacatctaaggtagtcacatttacatgcacttagaactccgaggggggatggatttttttatcagggctttccttgttttgatttgtggctattgctgatttttttcgtacgtggacatacacctacctcttctgttggaaagaacatttaaaatgaaataaattttacttaaaaaaaaaatcaaggagtcctctaatgtaaattttaattttaactttccaatttactttttatttttttttatttttatttacaaatagctcaaccaaacatttctgtgatgttatccatctctttcaatgtgtctaattctgagcaatgcttgtgtccccttgtgactatgttgcaaaaaaaaaaaaatcttccttattaactagaaaagaagtgtaaacgcattttggtgcaatatcttgactccttggtgctaatgattgcaaaattcagtgcttgccgctacaaggtgttacttactaatacaagatgagaaaaattgagaccaagccagatctctcaagtccaatgtggtgtttacaaactatgtatctcatgtcattgaaacgggtgaccggaagactgcagaagagacgttgttccactttttttttttttttacacagattaatttgttatgggcgtcacagagagatcatatggaaagaggaaatgtgacaaaaattagcatgaatatttctaaatcttccaacttgtcaaatctgcatgtgtgggatgtctgctgtttgtacagactttcagaacattttgtaaattataaagtatttattgtgcgttgagattccattccccctcaaaggcatgcagtcaccaacattacgggaacagcagcacagggaatagtgctgtttaagaggagctacactttgtttcttgccagtgtgtaatgactagagatgtgtaaatctttgcgaacattctgtactggctccccagaccccttcactccctgctctccgatttcagcacaataaatacactacagctgtgggaaaagtgactctgtccgtcgttgatttgtttctgccttaatctatttccggatgcctacttcttacatagaaaagcaatggaagtcgatcttaggtctcagagtttctggttcacagtctgttatttttgtatgttttcatttgtttatttttgagacagagtcctgctatgtagttcaggctggctatgcactcactacccactgtcctctgcgtccagagtgctgagattataggagcatagtagaactaaaagcttgtttttaatggtagcactttattattatcattattattattattattattagtagtagtagtagtagttcagtttgctttcagacatgcaacatattctaaataattctgaggagactcttagagtaccataccttaatcactcagttcttataatgagtttatggaatatgactttaagtgcttaaatgacagcctctcctaatagttt

SEQ ID NO: 35179 - DNA, 1267 bp, Mus musculus
gtttcctcgtcatatttgatatgttgatatatatatacatatatatatccccacttatgtatatatatgaattttttagtaagttattttaaagaaaagtaagtgggcttgcagtgggcttgaaggtctgtgtgtgctatgctgattgtgctatagtataattctcttgtggaaaggttgagctgcatttctttatatttagaatatatcaccatcttcactaataatacactgaactaaaaagttgaaaaaacaggtttgtgtttttaatttcagactttgtatgaacgttataattgtggtgaaggtcaagattcttcgtcatccaagacttttgacaaaaagagagaaagaaagtgatgcacagctacgtacaaaccaagaacactagattgtttcctctgccatactcttgaatctctgaggaaatctaccagttggaaacaacctcacctggattttatcagttaaaaaaacaaacaaacaaaacttcagtagattatcctcaaaaggaagctgtaaagttaaccactcatagcactgtgtatattaaattatagagttgtgcttttcttttatgcttttctgtaaatctgctaatgttttacgtttagaacagtgaatgatagctggaatgttgaagagctctgtaaataaagcgtcaccacagttccagaactgtacagtggtcagtttcttcaatcaaatgtgttcttggcatgatagcaaaatttttagaaaaacgggattaagaatagaccgtagtaaataaagtttaacaattaaatttccaaaggatttaggactgtaaacaggctcacacctttagtcccagcacttgggaggcagaggcaggcagatttctgagttcgaggccagcctggtctacagagtgagttccaggacagccagggctacacagagaaaccctgtcttggcggggaggggccggggagggggggagatccaaaggatgtaggaggcagagacaggtggatctctgtgattctgaagccagcctggtctacagaactagttctaggatagccaaggctatacagacactttctccccaccaccatcctgccctcaaaaaaattgtaaataaatttcctaattgtgtacagccatgataccatctatagtatttggtctgcaagtggctttttcagttctccctttgactcttcaaagtacatatggggtttggtgttctaaatattgtgctggagtttgtgatttaatgtctatagttaatacatgccat

SEQ ID NO: 35180 - DNA, 1222 bp, Mus musculus
gtaagaccattaggtgatttttgctgcacctcgactttaaattcctagtggatttgaaggccgaaatctctacttactattttttgatatgatctaaatcaggataagcaaaatcaattttaaagatttaaatatatttactatttcaaaataagagtgaaggcctttcccgaattctagattttttcggaaactcgaaaccaacgcctgtctttgcaatgaccatattgcacttacagactatgagaaacacagcctaaaacgaaaacgctactgaaaaatgcaccgcaaaaatgacactgcgaaagaacacaggcagtcgcgttgtgacaccccaagtcctgcagctgattttggggtgggacccagggaccacatctcaggctgcaggggccttggtatggcttccgtctgggcgggccgccaggtcatagcgtctccatccccgcccccgaacttccgtctccgattggtctctttcacggacccgcccctcgaggctgcccaatgaggaagcctgcgtcttagctcctccctccctgccggcagcgtgggctgcggtgcctgagaactggggatggcggcggtggctgcgcgcgcgggtgggctgctgtggctccgggctgcgggagcagagcggcggcggtgcggactgcgctgcgctgcgctggtgcaaggcttcctgcaacccgggggcgaggacacggcccagaagcggcgggtggcccacttcactttccatccggacccagagtccctgcagtatggtgagatttggggatcttgctgcatcccggctctatccttgccttgccctagactctagactctactctagagcctccttggttcgggtcagtttgcgttcctgttactcgtccttggtgattcttcccttcagatgcagcccctggaacttcaagataggtgagagggcactctgccttctgctagggcctgagggtgtagaggagttgtccaaagagcgctcccccgcccccttcccctgagttctatccatgctttccccatatcaggtcttaggtgttagcttgtcctagactgagtcactaacttgaggcaactgtctgtaaaacacttgccttttaattttcatttgaaaatgtaaacctagggagtaaatactagaatttgattttctcaaggtcacgagacaggttctgcctaaagatgggaaagaatccagacttctatttcagcc

SEQ ID NO: 35181 - DNA, 1652 bp, Mus musculus
agtgttgtgtctgtgtgacatttcagttgctccagaggaaaccagaagaccactactgtatcctgataatctgttctacttaaaaatgaggcaaatcttttcttttctcccaggtcgaggagcatgcaatacaagacttgctggttttctatgaggcatttggcaaccccgaggagtttgtcgtcgttgaaagggcaccacaggggcctctggcagtgcctatgtggaacaagcatggctgctagctccctggagagggtgctgctccccgaatgtggttgctccacccacatgaagaaaacgcatgtgcaagcgttcttacagatttgttagcacattgttgtagtcagagcaagaatggatatgatttttttttcctgtagtttataatgtttgtatgactaatgagaaatttatcagaattgtgattttagaactttcatgtgaaaatgtgtcaggaaaaatgttaggctaaggttggttggattgtttcttctaaattacctaagaaaaatgtgagtgaaagatgaagcttaggaataattcatgaaacatacatttttcacttgagactgtggggtgattattctagaagagcttgccgcataagatgttatgttaaataagacgttgatgaacttaaggcaggagcctcaatcattacttctgatcactgatggccagaatgttgtgtttgcctgaggagatgtgtctctgttgttgctttgtcactgggctgctaacttcttaggcctctttacagttgctggacagtttatggccatagcgtctgtgggatatttggattcgtagattttcttttgttgggctgggaaggtagcaagagaggacagacctttgaattcctaattgtgaaagaatcggtttcttaaggtttctacaaacaagcgtaagattactgaagagtttaccacagtggttgtttataattactttttagtctgtgtaatcagaatttctgtgagcctgcattatatgtatacatggacattttgattattcctttatagtatgctgtttggtttgattttgaatgtttaaaattaaaggaaaaaaaatttaaaatgtgtgtttcagtctgtagagcaaatgagaatgtgaatgcttaagttctgggaaagaatccatggcgataggttggcagcttgacttgagctgatgggaaattgttgaaagtaacaaactcagtgtttcagttcagttccacccacaagcagcagacgtgcaataaaagtaaagtcaatccacttcctctagcgtgtgtttgatttcatgtgtagcactagacacctggagggaagaatttctagctatctgtaattatttccccaatgggccacactgatggtcagttgtatatttttactctgctaaaaattccacttatagaatataaatttttttctatatatttgagtaatttgagaagaaatgaatttcacgacgtctctgtgatatcagtaaagaagctttccaaagtccttgacttgttggaagggttgatactctgaagacactgtaaatggcggttttcttcttgtcctccattctgcctgtgaagtgccctctggaatccctgtggcagttggatgacaggagtgtaagctggggctgacagcatggggctcttg

SEQ ID NO: 35182 - DNA, 1143 bp, Mus musculus
gtagactgattgatatatatatatttttttttcacttgtgtgagtaactatgactttagttttatttgcttagtttcttttttttttctccacttctaaaattaattatgtaagaaaggaaaaacttgggaactattcttatttttattgtttttagtatgttgtttaaccttatgcaaaaacaaatagaaacacactaaaggttgacagaatatttaacattttttgggtgatattcttgtattttacaaaatgccagaattgaatgtttctaagtttagtttaagtaaaccgtttcttttcaagggcgtcagcttctgatatatttccttgttctcttcatagtagtaattatctttgcttcatttccagcctttatgagattccagttgtgtcttcatcatctttttttgaagaatttggcaagctcctgagggagacagatgaaatggacagcttccacgatgtgacctttcaagttggcaatagacacttccccgcacataaatacattttggccgtgcgctctgacttcttccagaagttgtttctttcagatggctcttctttagagctgacggatgtttaccagaaagacgaagatgctgctggctgccatctctttgtggtggagaaagtccatcctgacttgttcgaatacctcttacagttcatgtacacagatacctgtgacttgttaactcatggcttcaaaccaagaatgatcgtgaagagaaaggcagaagactgtgagggctccccagattctcatctgcacactgtgaattgccatgtggatgataaacagaagtcagcatttgaggtgtacagaagcaaccaggcccacacacttagtgaacggcagaagagcaaacccaaatcttctaagaagggaaaaggtgttggggacgacgaccctgtaaggatgttgcaaagtgttgctaagaagtttggcctcagtaatttgagtagcaggtacagttcctcatcctgagctccctcctgagcccgcctcagccctcctgagccctctcagccctcccttgaagcattgttgtctcttgtgtttcctttcactctcctggcttcccttttcctctctctgcctctggggtagtagtacatggatgggacctttccctc

SEQ ID NO: 35183 - DNA, 1099 bp, Mus musculus
aaaattttttttataggtgccatatctacctggaaccattttatactttgttttatagactgaatttgactatttattagtcatatttttattgcatgttctcattactcttcttgaggatagggacattttgccctgactcagtagtagcacagtgtggtcatttgggctccgtgcctgcagagaatggagggagcgtgtggtgacacttgggttcatacagggttaatataggtaggcatgccgttctgaaagttaacttgggctgcagtgtggaaggtgtgtttgtcggaagaagatatggctgatactgaaaattctctgtgtatgtagtaagtacacagagcgtaatgctgtgttgaagatggagaggttctaaattcttcagaagaacttcatgtgtatgaaagatacttttatgtttttaaataatttttattccagttactctaatttcattgcagccttgattaatgatagttcgtttattttctttttagcagacattttaccaaacctccatcattcctcatcagatgtgtcttgtgtccctgatacaaatagtgtgtatgaaagaattcgacttgagaaacttccttttgcccatagagctgttagtgtcagcacagatccaagtgggtgcaactttgcaatcctacagtcagaccctaaaacaaggtataattgtctttaatatattctatttttagaaggaataatcattagaccttcttttgttttcagtagctcctgatgcatattcaattgaggagctgttagtaagatctgtagagacgttcagcaaatgagtatgttacagggcaatcactgggatagtgtgtcttcccctagtgtgtacctgaaaacactgaagatggtgcatatgcccacacagcatctgtctttagcccatgctgtacttgagagtcccgggctctgaaggatgtagtataaatactttttaggtagtgtgtaaaagtttctgacttttgaatatgataattgacaaaaaagaggtggtatggtcacagaaaatatattaggagatatattaggggagagagaagaggaacattagtggcattggtggagagggagg

SEQ ID NO: 35184 - DNA, 1166 bp, Mus musculus
tgggtgtcttctcagggcacaggcctgtcatgtgtgtatgcagtatctatgtgtgtcttctcagggaacatgtctcccaggcatgcatgcagtgtcagactatgtcttgtcagggtacagagaccagccatacctgcatgcagtgactcagggcataggcccttcatgtgtccatgcagtgttcatgaagaggatggttactaagtctctgtcacattagagtggctgattttcgagtagggagcaaagggagacttctctgcctgtttatattttgtaaaacattgtctatatgaggcatatattactttcataattgggggaaattgacattgcaagcatgtggctaatgagcttccttcatctttcatgctgatttaattaagaaaatgttgccttttgtatagtgaaataaaaagatgctgttttcttctttccactaggaaactcctcagggtgctccccctgcccagtgagaactggagcgctctggtcggagagtggtgctgccatcccgacccctttgctaataggcctcttcatccgagagaaaatgactgttttattggggactctttcttcttagtgaatttgaaaagtgatttggagcaggtaagagttgcactgaaaaaaaaaaaatcttttcaaaatacatgcttaagaggctgatttagataccagtttccctgcttttaattcagggtttgttgaagagcttgttcttaaaaagcccaaattcattatttttaactgcttccttccattctccagctcttcggataaagtaagaactttaaactcaagcagctagtagaatctggaagaacattcctgcatggatttgagtgtgctatcatttcccataccaaatgccctgctttctggacattataatcatctgtgcattttaatctcaaaagtcttagtaaaagtgcaggagtattagctcaggatatccactttgcgattatcttactgtgtttgcccaaggcctagactttttttttttttttaaagatttatttatttattacatgtaagtacactatagctgtcttcagacactccagaagagggagtcagatcttgttacagatggttgtgagccaccatgtggttgctgggatttgaactctggacctttggaagagcagtcgggtgctctt

SEQ ID NO: 35185 - DNA, 1131 bp, Mus musculus
attctaaggtaagattacatacaatgtgtattgcagcattaattgcaaagatgttcctaaattatacttaaaatagtaggtcagttttttaaactaaataaaaccaaatttcaagctgagtttttctattatctaatcacagtgattatcattttagtgacaaataatttggttagcttttttgttttttctttttaaaatcatggttctaactcctccttgggcagggtgttcacatctaatagcccagacttgccttgaactcctgatcatcctgcctcagcttacagaacgctaaatatgcactactgtgctcactgacagctattaacattgttaaaggcatccctacaattaccgaactaaatgtgttatctagctattaatgtcgatatgttttattttacttgtaaaatgcttacattgttttagaacttgagacaacaaatcctggaattactgggacccatttcaatgaatcatggtgttcatttcatggctgccattgcatttgtatggaatgaaagaagacagaacaaaaccccttccagaacaaaggtattatattcataattaaacatgcaatacttttttttccacttagtaaaaccatgcctatttatttcattttctacgtgctgattttttaattctttataggttatactgcagaacaaaggtattatattcataattaaacatgcaatacttttttttccacttagtaaaaccatgcctatttatttcattttctacgtgctgattttttaattctttataggttatactggagaaataaaatcttgtctacagctctacataatgactttttgtctaaaatttttattaaaatgtgatatcaagtatgaaagattccatttaagactggaagaatggctcagttctggagcactggccttgcatgcacaaggccatatgttcaacctcagcactgaaaaaaaaaggtgtgagtgagtgagatagaaaaattagctatgacatctggcctgtcactgtagtcgaaggaggattataatattgcatatttttaatctagtgatgggtagaaagcaaagattagagaaagtttttatctttgtttttttattatctgatgtcttttaagttgtt

SEQ ID NO: 35186 - DNA, 1752 bp, Mus musculus
aaacaaagaagaatttgtctcctcccagatgtacagcactaattatgaccagatcctacctgattgttatccgtggcctgcagaagtccagaaaatacagaccaaagtcaaccagtaacgcaacagctaggatttttaactttattagtaaaatcttgaagttttcatgatctttaagggtcagaatcttttatgatgattcatagtgtgcttagaataaggtgattttagtttaataacaaactcatgggagtctattaggataaattaggataaatttcacaccagacggttttgtttcacttactgtggatatttatgttttctcttgtgattattctctttatgaattctgtttaaaagctactgtacctgctgctgagaaagtcctcactgatatgtaggaagctaatggaagacccacactagtaataaattaatatagcataacttgattacatttaatgcctacagttctttcttgactattttgctaaaatctcttaaacagaaaagataaacacaaacttgggtatagctgaacttttactaaacagaagcactactttgttgcctagagaaaaatcttctcaggacttttattccaggcctccgttagctttgttctctttgtacacctgactcaacacctctgagaaagctcactgctgtttacagtaccctgcgtagccttagctcatcagcgtcttctgtcgttgttatgttatatcccatagagtagagctctcgttcccaaacactccatagaaacaccctttctcatctctgagcaacccctggccctgctgagatactcgggtgtttttgttagtgtagcctgggcagtgagaagggctgcaggagggtccttgagacggggccctgggaacccacctctgagacaagggagtcagatgccagacagtggttcccagacaagctcaggctccatgaagatcacctgctctaatgtccctgtgcttagttcggaggactgagagctcatggcatgagtaaatacatctctaatgcctacctttctatcagatattaaaatatgttaattaccaaaaccattctctgagaaaaaaaaaccaagcctttcccaggtggtattaatttactggacacgttgataatggcatgactagaaacagccttaactcctaagctcaggttcaagaacattctgtgtatctagagactcctgactttgaagttgctttaaagcctgtgtgggtttgcggcgggcagctctgtacagtgagctccttgaaggtgagggtgcagaagctttcaggtgtgagctaaaagggtacagacttcctaatgacaacttgtgactaacggtttcttcagtgtagttatttgagaaagattcagaatttctatcttttcttgtatgtttccatgttgtcaggtagttgtaaatgaatgtatttacctatgcaaaagatttattaaagcctagagaatatgaataataccgtaaatgtcatttttttcttaaaatatcatcgctgcacttgataacgatagtgttgagttttaggagatcatatgaaaagctattaatatttttaaataatttttttgttttgtttttaaattttatgtgtatgtgtgtctgcatgtgctttttttgccctggttttctctggtgcccacagaggtcggaagagggtgtcagatcccctggagctagaagtacaggtggttgtaaaccccccaatgtgggtgctgggaactgaa

SEQ ID NO: 35187 - DNA, 1179 bp, Mus musculus
agggaagtttctttggtaagtggtaagaactacactgacctgtggatagaaggacaaatatttactacacttacctatgggcagaaggataaatatttactacactgacctgtgggtagaaggaagggtaaatatttagagtgcatttaggaattatggtttataaattgcagttgttcttctataagatctaagaccccactattccctggcttcatttctagtattagatatgatttccttccagttaagtgggccttaaatctaattacagagctgttggttactcatcaggtttgtgggacaaggtaccctagggatattgtaccatgatggccaccgttacggtttataaccgttacagctgggtaagactgttgcttgcctccctcccttagaagcttgcatagcgccttcccatacctctcaagccacatctcatttgagtctaccgggttttatgtctgaagtgcatggtgtcaggaacattcttaataaagatgccatacgtagaagaataaagacatggtgcatttgggctttggggaggaattagcacaaccaggattgcgtaaggatggtaggagataacctgagccggagagttgaatcaggtccctgggagtcctgcagtttgtttcctgacctagttcagagttacaagtgcagcaggtgtcagctgacctacttctactcacatttaaaaatagagaactattcatttgtatattttctaacattaaggattgcatctttcatttttgtgtgcacataatgtgctctatgtacgtgtgtgtttgtgtatgtggattcgcatgcacatgtgtgcacatgcatggggaggccagaggaagactaggtgtgtttattgatcatttcaagcttatgtttttgacacagggtctctcactagcaccagagcttactgattgtctggccagctggggacccacctgtctcccgtgccctagcgcagggcagacttctgtgtagtactgggcatcatagttcagggcctgctgtttgcacagcagacactttattggctgagtgctctatctcccaggcctctcgtttttgtgcttttaggtccattttaggtcattgctcctgtccattctccactcccgtcctagtgtctgcggctaaggaagcagatggttagtgcacagttggccg

SEQ ID NO: 35188 - DNA, 1150 bp, Mus musculus
gacaaaaggctcttattttatcatagttttgttttgtgaaataaaggcttttgctacacacattacaaagaactctggagttaatctcatgtctgctgcatgttgcacaaaagtcacttctccagctcttccccttcctcaccaagctgtgaagcaagaatactcttaagtcatttccctggcactgaacatttgcacagctgctgtcacttcctgtgcagcagagcatagctatacagccgttatgttgcttgatgtattgtaactagtctaggggtaatttaaagtgtcttgggatatgaacatgcacaggacacatatatactgccattttatgagggtcacaaggatctgtagactttggtgtccatgggtaggtctagatccaagccctctcagtacgagctcgataactagctgtagtccaaacgtaccctcctcatttcatgagcacttgtcaatttgtataataaaggtttagaagcctatactttaaaaccaaatggctgcccttcctgttggcaccagcactggggcaccttgggctcggagtcagcagacacccccaaggtcccctagaggactctccactcggtcttaggaccaccagtgagtggaacacaacttctgttccaatcaaattgcgcgggacctaagacagcattagggaagcaggaaacctggcctgaccagggtcacaagtcccttcaggttggcgccagcatcggggcaccttgggcgtggagtcggcggacacccccaaggtcccctagaggactctccacgagatcttaggaccaccggtgagtagaacacaacttctgttcaaatccaatcgcacaggacctgagacagcattagaggagcaggaaacctggactgaccagagtcacaagtcccttccagtcggtgccagcacttcgtcatctgggcacagagtcggtggaaacccccaaggtccctagaggacagcatctgagacagacctcatttcaggctccagacatccgggcaccttccctgccagaggagaggtgtccaccctgccctggaggggtttgctggaacacctgggggagccatcttggttcccggatccctctgagactagtctgtgcaggtgagagtgtggactacaaaagctaacagc

SEQ ID NO: 35189 - DNA, 1182 bp, Mus musculus
ttacatcatatatatgtgtgtacatatataaaactgtcttgagaagttgaagtttaaagtagtgttgttttaatgatgtttaatgattgttttcctccagaggtgtttatttttccatctgtttctgtcatttagtgtttccaatgctgtgaataattttaagatacttgctttgtgacgtgaaaattactaaccatggctcactatttcaaagtagaccttgatgaagaatttgaacggtttatgaaggaggtaagctcaagctgtatttattgtaatatttattgtaaattcatcttgtaagatccatccttgagtgctttcttctgaaaacataaaccaccccatcagctcatcccttctacctgcacctacagaattatccagccgtcctcagttcgactcatttcaaatgctgctgcctgttagctcaatgccatcttctcacccagtctacccagcggtcccagtgaatgcagcattccctccaaggtgcatgtgtgcacgcgctcacatgcaaacacaaacacatgcacacacacacacacacacacacagagagagagagagggagagggaaagggacggagagagagagaaagagaaccatgttgaacaaatattttgctcaatttctggttataagggagtggttcaacctaatttttttttaaagttaattttcttcagttacaattcataaaccattcagttcacccacttaaagtttgtatgacaactgttttagaattatataaccttcaccatagtcagttgcagaatgcctgtatcattcctaaaaggaaacccttatcctttaaccattactcttggctctttgtccttccagccttgggttatcccttactgctttgtctccaagtttggctgttgcagatattcatagaaatggaaccatttaggatgtgtggtctctgaagtctggcttcttttacttagcatggtgttttcagagagtggtttgccattttgtggatataatgcttatatgttgtcagttgacagcatttgggatccttccattttggacagtcatgaataatgttgctcttaataatcacgcaagtgtgagtgtggatgtatgtgaatctcttctcaatatttgcctacacatgaaattggctagtcgtatgctctgttattcccaccaaccatgtattc

SEQ ID NO: 35190 - DNA, 1209 bp, Mus musculus
tggagctcagcaaaccaatacatccctctttacatgtcctttcacttgcttgctttagcgaaacatcctttcatctctgccagcttcagcaaaatgttccctcacctgtttgcttttaacaaaacatcctttcacctttgtccaactcaggaaaacatttcttctcgtgtttgccccagcaaaacaccatccgacacaactgactttctaaagaacccttaagtttccacttcatgcctggatctaaacgtgggtttatataaggctggggatggagctcagatgataaagtgcttgtctagcattcgtgagtcctgagttcagtccctcgcacagagcaaaaagccaaggtcaggtttaaaccttgctagttggactccacacctcagtacttcataatactgccttggaagttattcaatgtgagcactctaaagcctaatgtgtcagcattctattcctgcctccattgtctcccacctctataaacctaacactgactgcctagtctctctgaacctccatttatgcaatttgatcatcacataggattatcgtaaaataaaaatgagtattgcaaattgtatcattcctgactatatagaactttgtgggtggtataaaataaattttatacttctattttgcaaaaaaaataaataaataaataaataaaataaaaatgagatagcctatccagacaaatcacaatttaaaagtaaatcagggtcagtactgtgatgatatcagccctttgcagctaaatctgcagcgtcagttcaaccccagcctagcatggtggcacactcctttaatttcagcatttgggaggcagatgcagggggatttctgagttggaggccagcctggtcttcagggggagttccaagtcagccaaggttacacagggaaaccctgcctcaaaaagtcaaaacagcaacaaaaatcaattcatcctcaaacaaaaccttggtttttttttttcaattttaactttaagattataatatagtcacatcatttttccctttcttttctctaaaccctcccatatacctacccttgctcttgttcaaattcatggcaactttttacattaattgttattacatgtatatgtatccctagatataacttgctcagactgtagactgttcacttgtgtgtacaagagttcaggactgactattggcatttgataaccaattg

SEQ ID NO: 35191 - DNA, 1050 bp, Mus musculus
tactgattattgttaaacttttactgattgatgcatatctgacaaagtatatacattttctcatgatagattaggaataccacaaatggattgatggggcgatatgtgctatataattgtatataagatatttgaaaagatgtatttagtattagaatgaacaacaaactacatgggaaaattatctttagtacacttttttgaaatttttggtcagaaacaccaaaaacatactgttttgatgtcattatttgatggggagaaattaaaatatagaagggcttcatgcattaggaaaaggtagtcctagagtaaatggttgctcaggttcctaaaaattccaataataccctccgtgactgttttctccccacatataaatacaataaacaggaattcagtggtgggtatcaagttaatgaataaacaacttactttaagaatacactaacagacttcttgggatgtttttatggtgtagtatttactagtaatcttaccactcagtagggcatgccactaaagatgccatttatgaaccatggctcacacaggcatttttaaaaaactgagccaatatatagatggacttttggggtctgtcactttttaaaagttcttaagacataaaccatattagcaccacagtctgccttcaataatgtacctggaatgtttttcaggaccagaagcattcagttggacaaacttttttaaatgcaaatcagtattactctgggtcaaagatttaagtttttaacagtagtctggtaaacatttagaagtctgacaatgagaaacaaaagcttgtacccaagtagaatttaattaaattagtttttagcttatgtaaattcttttacatttatttatccatagaatttatatttatttcgttccttttgtctcactgaaagctgtctgcaggctctttgatttggattagatgtgtgaagtactgtctttcgccaaaaacctcaaatttcctgtttttttcccaaagtagtgggtttgtgcttgtttggagatcagttcaaaaactatctgtac

SEQ ID NO: 35192 - DNA, 2832 bp, Mus musculus
tgtgttccaaaaaaatccttcataacttctagcatggtatcttaataaagaataaagttgttctctttaaaaaatctgctctaagtagatttttcccctcttttttaattaaggatctcagcagtggtattctgaaatattctcttgaatttgtgcatttaaattttattgcagtgatacagatgccactgttggtacccttaaatttttatttctgctcaccaaggttaatcatgattgtctatatcttttttatagtaatcacttttgaattgtgttcagatgcagtttcaggtgtaatcatcagagctggttagtcaggcattccagatagtggttcttttcagaaccttttttaaagggttggttaactacctcagtagcagaggattgaactataccctgtctgtactgtacatagaaaatctttgtagataaaagcaaggcttgttaaatatgatatgagggtaagattttaatataccaaatgtaacattcttagttgcctttagtttcagaggcttgtaagacttcctcatgaccatcataacaggccttgcttttgtcgtattttgtggctgaaaaagcagccttgcttcttcagatattgtagttatttggatgtataatagtttagcaagatgttacttttgtaagacatcagatgttcaaaaaaaaagtgcatccgaacttgtactaaatactgcagtgtccctttataaaaagtcagactaaaactgacaattgtacagcaaagcctgacatttggatattttgaagttttttcataaatcatagaaattagtatatggctgtagtttagctttttaggtaaaaggtatgtttcattagtgcatttgttattgctgatcactataaaaatgtgaatcagctttccatttcttatgcaggtcatgataacttgtagaatagagtacaatcatttgtgctatgtttttaattttctaaagcaccttgatgacagtgagtgttcagtggtgaagcatcctctattgaatcaccctcaaaaaatttttttgccaagtcctaagttgatagcttaaagtcaaaagtaaaattatagtttaagtaggacttggtgtaaagaaacaccctcccccttccccaaagggatactgcagttctatcacacacccagtaggcaccacgatgacgatcagagctagacctgactaaggttttatacacaccagttccccagtaaatgcaaatttaacaagaaaattagacatgtcatatgttcaaaatgctcatggcaaacaatcattttgcattcctgcaaataaaattgttttatactgtaagctggaggcgagtgtaacttatttttgtaataaagtttttattttttttatgtgtcattaatataaatgtgtgttagtatagaaaatcttctggtttaaaaacttagaattgcacacatttcagtatgttcatttgtacttacataattttagaatagtggttgccaatagcctgtatgtttcccattaattgttttttttttttcctttctttttttttgttaccttaataaaccattttagtatgttgtatgtcagttactggtatagctggggcatagagtgtaatttaaaatttgtcaataagtattcattggaatatatgtaaatgtgccttgccggttactgaaacttacctacaaaatgagtatggggtgacaaatttgttcctggtgcttaatgaaactttcttccactgattttatatattaccctgtgctttttaaaagtacatctctcaaatattagtgtaagtttgagggctacacaaaacatgtacatttcattctaacatactgagtatactaggtcgtggaaagtgggtcagttaattgtagccttcagcaaaatcaaatctcagtgtaatccttggtgctggcacttcccatgtccaaggagtaaaatgatcctatttaagaggtcattgccatgcctattggcacttaactgtcataccatttttaacggacactgtcaaggtcttttagttaattcctggttttatttgttgggatatttgaacaggtttgttaaacctaactgcattgtcaaagaaagacgaacacttttgtgagtccacaaatgtgttctttaagaaaacattaaagtttggagctctttgggtttcaaagacttggcttttttaatttggggacgtgggatgaaaccttatgattcaaaggaaattgtgaagaattgatggttatatttaagggtaatgtaaacagtgataatgaaatgtagactcaagtgaaaatacttgacagtgttcattttaatgactttgaatttaagccattataattacttttaaaattaaatataatttgcactgttctgataatgggtgcagtttttgagcaatataatcagagctaaatatgcatgtagtgattagtgatgtgaacaattaagttctgagaagaaatactaaccgtggtattttaaaacttaaatttctgtagaaaaatcagtatcaaacacttaccagaagtcaagaaaaacaggcaatgcatataaacataattttgaatgttgtgtggcctataaagcaataatgcaatttatatggaatgtcatggatatgagaaatggaaatgcgaaaataactaatcctttagtaaaaatgtcaacatgttaaaaggggggatgttaactaatgtaggttattgcgtttgtgatttgtttatgggttcttggctttgacagcttcaaataatggacagatgagaagttaaattttgtatatattgtcaaggaaaggatctttaatagtcaagtcccttcc

SEQ ID NO: 35193 - DNA, 1751 bp, Mus musculus
cccaaagcatctgagagaattgataaatgaaagaaacatgcttaaaacatgaccgttttaaagggtgtgtattgaagcctagattttttcccttgtaagcatgcaaacataccgttgtgaagtaagaatccgggttcctggaaatgtattgtgaagtagtcctggccaaactactctggcctttgcaatttggagtgactgttgtgaatgcatggtgtacaaattgattgtacaaacagttgtgagacataccgggtcagaacagtgatgaaatacatcccgaagatgatgacctgaagataaatgcagcttctgagagaagaccattgtgtttaagtggtagtcttgttaatgcagttcttactcatagcatgtcatggtacctctttctgtagtgaatgctgaccagtgagatgccagcctgcgtgtgaagatcctacagcagaagtgcatgtgagtggtgctctgttttgttttctgctgagcttactgtcgttggtctagtctatgatgatcctatcccgaacctgaattcctgttgaaaaaccataattacggatctggcttctgagatggaccattgcaaaggactattgtgttcttctttaatgttggcaatgacgtaatgcctgtgtttttgtttttatattttagggccagtgacacaagaacttgcgagagatgccagtccgcctgtgaagatcctgcagcaggagtgcatgtgagtggtgctctgttttgttttctgctgagcttactgtcgttggtctagtctatgatgatcctatcccgaacctgaattcctgttgaaaaaccatacttacggatctggcttctgagatggaccattgcaaaggactattgtgttcttctttaatgttggcagtaacataatgcctgtgttcttatttttatattttagagccagtgacacaagacgtgcgaatgaaaactagatgtgaccatccagaaaaagcatagacaaaaaaatgcagtcttagtactgggatgtttgagatggggtctatctacatgtctctagctgtccctatcaggacagcatctggtgtggcctgcagagttgattcctgtacttttttttttttgtgggctgtatgtaaatggattgttttgacaatccattcgacagtgttctcttctgtgaaggtcataggtgagctgattgacagacacagctgtacagactgaatgcaatcctgactataaagctgcagttcatcattatgagctatttccttattctggcagtgattgaaataaaatggggagtattgaaataaaaaacattcaattgcaaatatttattcaattctttttgtgtcagaagattaaccagagtgccctggtacatggttcattccacttctgtgggaattgggtttgcaaagttactgtgcaaagcgcactgtcagctcccaaactagctagcatgatcatacacattatcaggtttccctgagaacttgtcaaaaaattccctccctacccatttcttaattgggggggggggttctagacagggtttcctagccctggctgtcctggaactctagaccatgctggccttgaactcagaaatccacctgcctccccagtgctgggacatttcttaattttgagacagtttctatgttctatgcttggtttgtctttattccacctgcctctgcttaccaagtactaatactaaatgggcttctacattaactgctgcacccttccattctcct

SEQ ID NO: 35194 - DNA, 1171 bp, Mus musculus
tcctgctgagtcttctcaaggctctatttccatcaagctagcaccaaggttcgttacaacatagctgtgtccggtaagtaaatgccagtcaagaaactcttttcagccgggtgtggtggcgcacgtctttaatcccagctctcaggaggcagaggcaggcggatttctgagttcgaggccagcctggtctacaaaatgagttccaggacagccagggctatacagagaaaccctgtttcgaaaaacaaaacaaaacaaaaaaaaacccaactcttttcaactcttttcaattttaggttgtcttcacatttgcctagttcctcttggtcaaatgaatcaaatggcaacccccatcttattcttgggaactaaacaagggtttggatacatggagatgccccatttgaaaacattactgtaacggtgccctatatgaagtgtgtattagccgggcgcggtggcgcacgcctgtagtcccagctactcgggaggctgagacaggaggatcgcttgagtccaggagttctgggctgtagtgcgctatgccgatcaggtgtccgcactaagttcggcatcaatatggtgacttctcaggagtggggaaccaccaggttgcctaaggaggggtggaccggcccaggtcggaaatgtgcattacttaaatttttttcctgtataagcatgggcaaaacccaaaatctttaaatctgcatatttcccatgaaaatgaattgtataaaagaagcagtaatgtagaggaagtgcccatatcgagccctttggatggattaatagaatattaaattttagtgttaatggtgggaaaatataatgactctgtttttttaaaaaagatttatttattttatttactattttatgtagctgtacagatagttgtgagccttcatgtggttgttgggaattgaatttttaggacctctgctcactctggtcaacccctctcgctctggtcagccctgctggctcctgcctaaagatttctttattattataaataagtacactgtagctgacttcagacgatcagaagagggtgtcagatttcattacgagtggttgtaagcaaccatgtggttgctggaatttgaactcaggacctttggaagagcagtcagtattcttaacagctgagccatcttgccagtct

SEQ ID NO: 35195 - DNA, 1181 bp, Mus musculus
agggctacacagagacacattgcaggggttgtctaagaagaaatgtaaggcttgctggccttttacccaggctgacaaagttaaaggcaaggcagtgttgcgaaatgatctgacctctttctgcagtcttttctgcttatttccttgccttctaatgggtctttcaatatatttacttgatatagtccaagttattatgtattttatatattaacaagtactagtctcccaaggagcccagagataagccatgtctctattctctttataaatacaggtacaggatgctgaagaaaaccaaaagcaacctaatataaataatgtaaatagaatataaatagaaaacacaagtgaaaattttctttattgcttgattactttggaagagggcctcactgtgtagacctggagctcacttagatcaagctggccttaggaatttatggcaatcccacttcccaactgtaaattacaggcaggtgtcagcatgctggcaaagaatccttcctgttagaggattatacagattgagtccaaaccaattgaacttcagggaacacacagttgggcctaagggactgcatgaataaagcatagtatagtttcagatgtatttgtgatagattgggatcttggtattagtgggatagaaaaacatggaatacaagataaggctgaatgctaagtacattatagtttttgaagacggattcaaattgcaatgtgttttcagtaagaaaatgtgatgagaagttagtgtgttcattgtgcattgaaggaggaatgtttgtatagggtgggaattaggggtgatatgtgtgtgagtgcgattgccctttcaggccagaagtgccgcagaccctctgggcccctgtgtctgcatagaacgagtctctagagtaggtgggcaaagcttaggatttgacaaacagacgcacacagagaggtgttgaatctgaatgtaatgtctggtcgagcattagactatttataatacagcgaattatcaggagctacaaatcactataagacaaggtacactgaaatttaccagatacaagagaatgaagtttgtagaaactagataaatgtttacaatagagattagcagccctgcctaggatcagcctagtgccaggcaagagtttcacactttagtgttaatagcaccagggggtttt

SEQ ID NO: 35196 - DNA, 1199 bp, Mus musculus
cagacttctccatgaaagcacatctctggattcagctgaaacccatcgtgtttcctggggaaaaaagagcttctccaggggaaaatactactgggaggtggatttgaaggactataggcggtggactgtaggagtctgtaaggatccctggttaagggggagaagctatgtggcgacacccacagatctatttcttgagtgtttgagaaaggacgatcattacattctcatcacccgcataggaggtgaacactatatagagaagccagttggccaagttggcgtgttccttgattgtgagggtggatatgtaagtttcgtggatgtagccaagagttccctcatactcagctactctcctggaactttccattgtgctgtcaggcctttcttctctgctgtctacacataatcataggaatccagtatgctagtgcttttctagtacttctatgataatgtgtcccctctttattgtgatggtttgtgtatgcttggccaggggagtggcactattagaatgtgtggcccggttggagttggtgagtcactgtgggtgtgagctttaagactctcatcttagctgtgtggaagtcagtcttccactagcagcgttcagatgaagatgtagaactctcatctgggtctttaccatgcctacctagatattgccatgatcccactttgataatggattgaacctctaaacctgaaggccagctctaattaaatgttgtcctttataagacttgccttggtcatggtgtctgttaatagcagtaaaaccctaactaagacatgttaaaatgatattaagggatggagagatggctcagaggttaagagcactgactcttggttaagggactgttcttctgaaggtcctgtgttcaaatccccacaaccacatggtggctcacacccatctgtaatgagatctgatgtcctcttctggtgtgtctgaagacagctacagtgtacttacatataataaataaataaatttaaaaaatataaaatgatattaaatgtaaaagatgggtgactgcttcttatctgtggtccacctgttcctcctagaacatttacttttttaaaaatattttatttattatgtgtaagtacattgcagctgtctttagacaccagaagagggcgtcatatctcactatggatggttgtgagtcaccatgtggttg

SEQ ID NO: 35197 - DNA, 1242 bp, Mus musculus
atatgtttacttatggtcttcaattaggtgactgaaacttaagccttagaatggaggacttgtcattgaaaatgaatgcatacatacatacacacatatacatgcatgcattcaaacatacatacatacatacatgtctgttgtcagaagtttagtcttttggtgctctattttagattgggcacttcaaataaggttgtttattcattccaaaaaagatattaggttacatcctttggagtccctgatcgaccccaaccctcttgtaagcaatgactctataccacactgtggcgtaaccattctgcccacaccacagattaaactatcaaagtatcagaaagagcagttttcaacttcttgctctgtggcttgctcaacatctgagatgtactcttcttggataataagtcttgtcaaatcccaacctgactccttcctttgacaggtgggattatggaggccagatgaaactgctgataaaatgaagctaatcacagtccattcattgtcactgccctagggaaaaaatctatttctaatgggccctatgtggatcatatgactgtaagcctaattcaagaatagaagtgaacggattctgtagaactttctaatatccttttcatttctggggaagtagtcaaagaaatccaatcttgctctaagtccaactcagtgttgtcccatactgaaagcacgatccagaccataaaggtcaaagtaagactggaggttttctctggaaagtggcgtcttcaagcaggtagcaccaagtctagtgctgatgaaccacacctttgctgtgcttatgaggtcatggaaacctggtctcaggatccataaaagatgatgtttatagttaagatatttttccttttgacaccaacctgattttcttatatcctcgacaccccctagttcccctaacccctcaagactcataatcaagcaagacaaagtttacttgacaaaaaagtatacaaccctcaatataataagtttccctcagctcctgttgcaatgcagcagccccaaggtaaaggtgactgactggccttctgtctttataaaatgtacatgtttcacacccaaatttaaagtcactgcatgttacaaattcactccatttttgttggcttgcctgccttccttccttccttccttccttccttccttccttccttccttccttccttcctccctcccttcctccctccctccctccctccctccctcccc

SEQ ID NO: 35198 - DNA, 1369 bp, Mus musculus
accttggctgctggattatgccctgcctgacttagggttagcaactgactactgttttcttcctgcctagatggaatctgcctgtgtaactattcacgaggctctgaagactgtgatcgactcccagacacactatcgactgcgggaggctcaggaccgagcccgagctgaagaccttaatagtcgagtgtcctactggtctgtaggcgagactattgccctgtttgtggtcagcttcagccaggtgctactgctgaaaagcttctttacagaaaagcgacctgttaacagagcggtccactcctagcctcgaagtccctcccacagtccctcacccctcccgggtctcaggttcctacagggctggtggtgtgacacagagaagagggagagcagcagggagaccaaaggcgcacatatctgatctttgcactccaacaacggaagctcacagagccccggtaatctgattgtattgtgtgtgtaacattggccaaaagtgtttacaggtcaacctagggtttggtcactacgggaggccagtgatctagcatccaatctgtaggagaactccaagtgcctggacctccagggcagtttagggttctgccactactccatgagacattggtcattaggtggttgtgtcttcttccatcttgagaaagggaccctgagttcttgccttcccttcgtggacctctctattcctgaggaaagctggtctaatctggaaacagtagggtcagacatacaaccaggacccaagtagagagtgagtgagtgcccttggtgatctatgtctcctggaggcagaactgtgctaataaaaaccaagactgagcattctggagtgatgtgtgcctctattttacttaaaggagcttctagcttgatgtggagcatgggtgtatatgtaaacagtgtgagagagaaagtggctggagctgtatgcagtgtggggtagagatgttgagaggagccagggaatcatgccccttccaagggagtgacaacaggaggaccccttcccatgccatccactcagcagcctgcgcatacatgctttcctctgtggcaacaggtaagccctatgtgcatgacccgctccctcatttcctgttaatcagacgccatctctcaatttaggtgacaccattgtatttgtcccaaagtccttctggttaggaaggacttaatgcacacttaggaagtatggtgggtctgggaggaagacagggtgtccatctaaaggagagctagcaaggaatgtggcaatccaagctgacagtatgagaaagagggcagatcagtcctttgagaagctggcttggaaaccttacttccttagctttacaaaggtaagttt

SEQ ID NO: 35199 - DNA, 1140 bp, Mus musculus
atcataaaccaaaagaccttacactgtaaaataccaagaaatgtaaaaggaagtttaactttgggcatatatgcagggacagaaaaagaagacaaatttgaatgaaaattcatctgccttcaatgtagataatgaaatatcacatatagtttcaagatatttaatcagaagacagaaatgattctctccactgttaggtaaaaggtttggaataaaggaacccccttacccgaaaaataaaaggtcccaaatttgatgctcaaggaattccagaaagcagccagcacatgccctggagcagaggtcacacaaagcaggcagtttgacttaaccctttgaggtttggagaaccaatttccccaaaaagcagtttgttgtgctcccccagccccacccccaccccaccccactggactatgaaatccgattcttagaccctacactgtgtcttcctgttccctcatactaaggcaagatttggagacaacctcttagagcaatgaaggtttgtctcactgttttcagttggaagaaaagatatttaaagaataattgaaaggaacaaaatggacgtagatcaataaagttattcccctattccaccagtatcaagaacaaaaccatagtgtggtacacccatatttaatgcagcttaatggggctgatggtccccctttagaaaagtcctctttagagctatgtgcggtggtgactttcagtcccaagacgacttttgaggccaagctgctttatatagcaataccaagttccatagactattttttctacacagtctacatagactgtctattttttttttaaaggcaaatgtgttttataaaaagaaaaaagccaaggattggtttggtggaggctcagtatggtgctggggaagggggtgcctctctgggcccatgctgaggcatcccagccacacaagtatagtatagaatagagtttacatagattatggggaggggaagggggagtagagatagaaaaagggagagacaggagaagtggctgtggagacagggaggggaatgggggagaggggactggaagagggggtaagaggaagaggagagtgagcaaggcaagcagctccttttgtagtgagtcaggcacacagggaacttt

SEQ ID NO: 35200 - DNA, 1184 bp, Mus musculus
gcactgtgaattgaagaaatcagctgtagtggtatgcattattctgattcttgttgggagagaaacattttaatttgaaaaagactgagacttccagaatatggatcatagatactgtgaattacttcttgaacttggtattgaaggaaagattggagtgttcgattatttatggccccttttctacagtggtaagcattccttcagagtccatttgcaatatagaaatgaactactgtttcacattttgcattcctttattgtaggtttagatttgaaatacgttagtagacaaccttgtacttaaatggacagtcttgaaaaagctatagacagtgaatattgttttagggtagttggaggcacctgtctctggtttaatagagaataacttgaggggcatttttgtttgttatataatcttgctggattatatattaatggtttggtttttaggggaggcagtcatctatgatcagcatctataaacgttttcacaatgaattaacaattttctttttaggtacctggcgaagaattctgcaaccttgttcagtgccagtgattatgaagtggcccctcctgagtaccaccggaaagccgtgtgagggcgtgctcgccctctctccctcgtgcttggatctctgtaaacagtttggttcttagtccttctcttgtacaaatgatgtactttgaagaccgttagtgtataacagagttgtttgtttcctctttgattttaaacagagaaaataaaaggagtaactgctccttttttcttccttttttcatttcaaagtttctaccagtgtatcagtgacggacaacagagagacatgctgtagagtgtttgcctagttgacaaagctgcttttgaatgctggtggttctgttcctttgacactacgcacttttataatatgtgttaatgctctatgacaaatgctctgattcctagtgccaaaggttcacttcagtgtatataactgaacactcatccatctgtgctcttttttttttttttaatggtgcttaaagagcccatcctttgcaagtcatccatgtcattccttaggcatcttatctttgctcaactgttaaagaatggtggcttgttttcatgggttttgtatttgtgtctaatgcacgttttaacatgatagacgcaatgcatcgtgtagctg

SEQ ID NO: 35201 - DNA, 1202 bp, Mus musculus
accctgtattaaagtaaaataaggaacagtgaagataaaataaaataaaaattcagagcacaaaccaaatacttgaagcaaaaatgagttttcattttctttctcttttcagacagcactttccataggccagtgtatgtagcaatgatgggttatttaagttttccttggaaatttgtatcatggattagtccaataatttgaattctggccagtctgttttcatccttttttctaggttttgcagtatttccaccatacatatagaaaaggagaattatatatctgtatcatattggtgttgataatgtatattaagataatgatattttgttacagtgtctttattatctcaaagggggttccaaagtaaatactcaaagcatatactttttagacattattttatactgaaacaactgacagtaggtaggacattagtgattaaatctagtttatttgttccaatgactgtaaaatttgcctcatagattgtctggtcattaaagaatgtattgtaattacctttcatgcatggtacatctgcgattgctctgttgcctttcctctgatggcctactggggcagcacttgattggtacactttgccaactgtaaagcttctactttctcaccttgacatggtgattggtgtctccaccatttcttggagcctccctttagctgcttttgttccctgccaggacagacccatgtaaagcactaagatctccgttggtatgttgaacacttgctttagtggagtgggagtccttgtgtcttcaaagtctgatcatctcaaagcctgtttctcctgcaaagtgtggacttatccatctctgtcacagtattaacatgttacaaatacaaggaagataatactgaaaaaaaaagaattattttcatttatacgcttatactttttattttatattcctgaaaactataagaaaccagttcgctggcttaactgactgccaccaggactggaggagtatcctatggcacaaatatagtgtacacacacacacagacacacacacacacacacacacacacacactcacaccctgtattaacagtagtaagagtatttgttatttgttcatgacattctaattctgtagaacctgagctattttgaatgtctgatgtgacttttattcatctctgtatttatccatctttgtaaatgtgtattt

SEQ ID NO: 35202 - DNA, 1129 bp, Mus musculus
agcaaactaacaagcagcctctttagcctcgagaaaagtcagagatgttcctggtcctgtcagtgatctttgtctttgtcaaatgccagagatttgagaaatagttcagccaaaatgtctttggctctaccatggcctgaggcaggaatgctacaagggaagtctagtttctcctctcctgtatgactatcctgcctggaatctctatgtaaggatgtgactacatgcctcatgggagtgtctgccacaagttttatactaaacccctggttccaattttctgggactcattaccacagtagaaggggtttgccctcactttgtttcttaaagtttcaattataaactcatgataaataaatttctcaggatccttctctgctgccacttcacccaagccaactgaatttctttttaaagtgcattctcctgtacttacctggcaggggagataccatgatcacaaaggtggttttcccagggtgaggcttatccattgcactctggatgtgctgaccccagcgatttccccaaatgcgtgaaactcaactgcataatttgtggtagtggggaaaaataaaaaaataaaataaaatgcatactcctcattatctatgaattttgctcttcatttatgagataagaacctggaggccactgacagcatacatgttgtgtgaccatgagaacccatcaccccagctttaactgaattaaagcccttctgaagggagacagatgtcctctgttgaattgcaaacatctcatttttctttattggtataaagggagatctgcctgtctcaaatacatgtagtgaggaacctgttaaaggagaacactaataaagtactgggtggccaagagtaacagcaaagaagacaaaaagagaaagaaagaatggtacacacacacacacacacacacacacacacacagaggaagaaggagagagaaaagtggatgggggaaggtagggagaaggggagaataagcaagcaagagaaatgcatttattgttagtagtttttaaaataaaatttaaataaaatataaaattaatattttaaaagatgtggtcaaacataacacttgtctttgtactcctttatttataactgaacacttc

SEQ ID NO: 35203 - DNA, 1208 bp, Mus musculus
aagtaggcattttgtgaaagctcatctcctataattgaagtactcgattcaggacctgttttccttgagccactaataaactttcttctaccagtaaaataatttctcactacatgagttagtcattgccgtgtaatacagcccattgtacatgcctgtttttcagtagctctttgtgtaactaatcagaggctttcccatgtgataatgaagtgtttaatcaccataatgttatggagaaacagcatttaatgtttggctaaaccttctttctttatcttttcagataaattattagtcataactgtcgcaacaaaagaaaatgatggattccacagatttatgaattcagccaagtatttcaattacactgtgaaggtatgatatgtctttcagtctttggacttgttggaatatgtgcctaaaatatattaactagtggtttatttaaacatgttctataagcaacagaaatgtgtatatatgtaactttcctgacttcctttggagggtcatgtccacatacattgtaatcaaggtttgacggtaactattttcactgactaaagggatggcctgctgtggtgtcagttgaaaacatgatgggacggggctttgggggtgcgctattgacagtgtttttcctgttttgtttggtttgggttcattggttggaacattggcaagtgttttagatgttttgtctacatggcacggttcatggatatgatcagaggtgacttggagcccctgatagagtcttaaactgccttatgtgatatgtgctccttggatctgattattattattatttttttgatagaaagcatatgacaggcatatcttttctagaaagaggagcatagggaagtatctgagagactgaaaaaaaattaaaaacaaaaagaaggaaaacattgctcctaccttgggaaaaactgggctgttttagcctataatatagagaacagtagcctctagatgacaaggtgtggattttcatgcagagtattaatgttgctgaactttgttggaaagagatctagtgataacatgtacgtgcttaaagaggataagtgagaaagtaaatgagaaatatcattagcttgccttgatggaaaacagtatatacatgcaaacaaataaggtatgatttgcctggaattcagagaaagagccaataatggagggttcgatgtgaagagaga

SEQ ID NO: 35204 - DNA, 1157 bp, Mus musculus
tggctgaggctgaggcagatgttggaaagtcagggcctgcttagcccagactagctaaacttcatcccttgccttgggtaattcttatttaacttttgaggctaatacaaatgtaagatttgccaaagaaatgagggttctttacactggatgctttcagtgtgtccttaggtgataggccaggctaggagcctttgagcagaggaatttccttgtagatttcctatcacattagacaggtgaactacaggggtttcttcattttcatttaagtctgaaaacaagaatgagatgagaaatacttcctgagtccacttctataggttaaaatcaacctttgaaatattcggaatgtgttttagtggtagatctcactgtagaattatgaccctcccgtgcgttaatttccattccttcctagcattgtgatttaattataaataagtagtggctttcaaggactggggcacatcttctgttgacatttttatgctgctatcgccattggcattttcctcaggatgagctcttgatttcatttctaggttcttggtcaaggtcaggagtggagaggcggtgatggaatgaacagtatcggagggggccagaaggtgagattactgaaagaagctatggagcactacgccagtcaggaagatctggtcatcttgtttaccgagtggtaaggaaaatgtcctgtgggcttcccagtctgtattatagtacctttaaagactgaattttataattgaagcttaaatgttgaaatattttactaacaatgactcattgtataaagtgtattttcctcacatataactgaagtttttccagtgagcagttcctgcttctgagccccaacttaaaagcaagattgttttatactaatttttttcattagcaggaatttttcttctatgtaaaataaagtgtctatgcgagaaaagtcacaatctgcaccgatcttgtaatattaaagatgatgagttataagcactaatgcgaaaacaaggaatagtctaacatttttgggaaattcattttaatcttggattaaaagcacagtagaggtcatgcttgagtgtgcaattgagggagacaacaaaatgagctctgttcaaacatcaaaaatgcttcataaagttgcaaatataagg

SEQ ID NO: 35205 - DNA, 1171 bp, Mus musculus
gattccatattatagagtatatcaactattaagtgtatactgatagcagcgtgagatatgttagtcaaaaccagtttatcagggataataatgaattggtcactgaaacttcctgtctatgaatgtcactaaaatatttgactgtcaagagagaagccttatcaagtatttatgctggtgtcattcatttaaattaactgtaacatttgcccattggcttataatttttatttggagataagttactatatattatcatgaaaaatatctcatatttttatttcgtttgtcaaatgtagttcctgtgatgtgagttgggaagaggttgcctgctgtgttctctaaacctgttttaatcctgtatggattcttttttttttttagagatttttttcttactcaaattgtgcttaaattctgaaacatgcattttgagacttgtttgtttcttctaaaaacagttttgatgttgtatttgctggtgggcctgaagaagttcttaaaaagttccaaaagacaaatcataaaatcgtctttgcagcggacgggctgctgtggccagataagcggctggcagacaagtaccctgttgtgcacattgggaaacgctacctgaattctggaggtatgaacagtgctgctatagacggaagtctcaaccccataagcatgatcttgctaggaaatattctgaaagctcactcacaggttagcgcttgaaaaccatttcccttggactacctgtgtatctaggcagtgtggatattcaacttaccacattataagtgagaattaagtcttctcattacagttcattgaggtgtttttggcataggatattaagttttaataagtttactttgaaaaagtttcatgtttaatctgtaattgtgttattaaaaatagtcacttgttaatctggtctgtttttaaatatattgtgcttaattacttactgtgactatttttagtcaaaacgttaaatagtgtctgagtgtacagaagtgttgtattccccacatgaaccaccacagattaaaagtgatcacatacactttttttttgtattttttttattaggtattttcctcgtttacattttcaatgctatcccaaaggtcccccatacccacccccccaatcccctacccacccactgcccctttttggc

SEQ ID NO: 35206 - DNA, 1573 bp, Mus musculus
gtgttttcactgctcagcaagtctcctgcattgatcttctagggatttgcactgctgaattttgtagtaaagtactcacctgaaagacagcgctcgctccgtccccaccacgatgcctcaacctttaccatcaacattgctctgaataatgtaggagaggattttcaggtaattatgacaaacatatgaaaaaaaaaagtttaggaactgtggtattatggaaaaggctctgctgatatttgtttttttgttgtttggtttttgtttgtttgttttttgctcgccatttagatggcacagtttgaatgttgctactgattaaaaatgtgcatgtttgtgtttaacttttttagggaggtggatgcaaatttctgaggtataattgctccattgagtccccacgaaaaggctggagcttcatgcatcctgggaggctcacacatttgcacgaaggacttcctgttaaaaatggaacacgatacattgcagtgtcatttatagatccctaagttatttacgtaactcaaactgaatggctctctgagatggatgactggcgtgaacatgtctctgaagttgtacttgagaagacaagaagaataatgtcaacagaacaacatcactttgggccaagcatttgaacactttttatataaaattgtgtgatgtctctttatgtctgctctgagccttaaaacacaggttgaagaagaaaagaaaggaaaaaaaagtgaaagttggtatttatttctgtgctttaattgtctctgaaaataatgacagtttataaaatgtttaggtacaaaggcataaatgataataagtaagcctggtaatatgttcttatttaagaagaacctgagaaggttttatttatcggtgggggaagtatagcaaacggttctaaatgaaaatcagcaaacctgaaagcctgggattctgacgcctactggctctatgtaattattaagtcacattgacctctgtgtagggctgttttccaggaattaggaagaaaacccaaagaaaatattgcacaaaggtttccctcaggaaacctagtgcagatagccatggaagcatagccactggaaaggaacagtgcatgaggcagatgttcgtttctggtggaaattgggcccctgtgttcctccagggcaagtctcaggggaagctcatgtctttctgctttacaaagtgcttcaagcgtcagctccaagtgtccttatgtcagcaggatttgtttccttctagtcccccccccccccattatagaaaatagtaaggaaaaataacagtttcattgagatcagtagtaaattttactatgttttttttaaagcttacgtacttgaattttatatcaggaagatggtttttgagcctgttccttacccttgactatagttggtagttggtctcttttttccccctaggggaggggtttttctttccctcactgcaatctattttctcattcttagtctccttaattacttttcctctaccctacttgttaaaagttcccacagcaaaattttttatttcaatttttaatatttctccaaatgag

SEQ ID NO: 35207 - DNA, 1162 bp, Mus musculus
attttgaagggagtaggaaaaaatcatccaagtcttttgcgtccttagagctacactaaagtatagagtttcaaaacagaacaccattatattttccacctattcataacatggaggttgggactcctaggagagccgtctgtggttccacaaacatcatcatgtttttggggagtgactgtggttgtggttacagagcaagaagtcaagaagccttccaggcagtgatggctacttcaggtataactaccattagagaggatgtggaatttcttttatctttggggaagttttgaaaagatagtcaaggaattaggaatttaaaattacagggaaaaatatgtatgtgaaaagcaataaatattttgttctctttgctatcaagatgttcacactcagatatttattatacagcaacaatttatatttttaatcattgcccattaatagacgcagtgaaatatttttgaatcaaaacatttggggtttgtatgtgcatttaaattgtcttttgtactgtatgttactgtttaatttgaatattttatcagaactgtctccctgtgcctttataatataaagttgtttctgcaacttttaatgatcttaataaagaatactttaagaaccatactttggctactctgtcttcaaccatgcaagtttttcttgactcaaaaaaataataattattattatttcacttttgttacagttttttggaaattgtttcagttggatataagctgagtttaaggaatatgttttgttttgctgtgatagtgatttttttaaatttactaataagtggaaaaaagagcttaggaaatttcaaatatatataaaagaattatatgatgttcacagctattgcagtaccttccagagttaccaagcatgtttcagctttaatatctgctttcctcagcttcccttaggtagttaactgtgtcatttgattcaagagtatacattaggtgtgttctcttccaacaaaacctacagtgtaactagtcaaaaatgaatagtaatggccaaagcagaaagtttttcataaaccttccaacttcaagcattctgaaccacagggtgactaggtggagcaactaccccccaccccccaccccccaccccccaccccgggatagggtttctctgtaga

SEQ ID NO: 35208 - DNA, 1302 bp, Mus musculus
aaggtttgttaattaatgggatgctctgtatgagaacgttaggaagttgtttttcaaataaacatttctgatttttctttcacagataagcctgagaattgggacgtatggtatgaaagcaagtttgacgattgtgacaaggaagcttgcttgtcattttcaaaagaaatcctctgtgctcgtgtcactgtggaccacaattactatgccgtttgtcagaacctcttatccagacatgccacctggcgcggcacttctggaggactcctccatgatccaccaagtgaaattgccaaagatggccgactggaggccttgctggatgagtgcaccaaccccaagaaacgctatggccggttccaggccgcaaaagaactgcgtggctatctggcacagttaagtcacaatgtgaggtagtcagcagtgatctttacattttctttgctgaaaaagcactgacaaaactaaaccaccaaaaaaactgcctagaataaacaaagtgtggaagtatggcctcgagaatgatgaacttctgatagatcttacgttaacacccatcaaataagacattactgtacatcaacgttctcacgacgcttctgcaagtctgttcttcactttggagattgagataccattgactgcttttccccttcccatacctgagtggatgatattgctaagctattggaaaggagtctgatagttacatggcttgtgtatcaaagggtacttggtacttagtttgcatttctaccatgattttgtgaatctcttgcatttactttgaatttcaagttagattggcctgttttataggccacattttccttctgatgtgtaaaatcattttccattttttaaaagttttacgcacccaggttactataggtgttcatttaaaatttaatataagtagttttcattccgtgctatgcggtacatacttaaactgttagggcaggactcccaggtttactgtttttacagagatcttagtatttcaccatgtaaataatttgcctctccccagccttctatgcttttccactgcatgataacatcatttcaggttatttaagagttaactccctcaatgccagtaattacaggtatacactgaacatgatgttcagcatatgctacaaaacgtcactgcatcctttgctaaaaggcttcgagaataatacactagcagtctacacttcgatcgctttgattgaagaaacaataaaagtcaaggtttctaaatgctaactagtccaagatagtaatgcatatgccaaagaaatattagacaca

SEQ ID NO: 35209 - DNA, 1174 bp, Mus musculus
tccagatgcctcctccgcctgagtaacgcccaccctctagtctgcgggctcctccactcacctggagcggagggtgcgcctcggagcgtccccagatccccgaccggcggactgtccggctagcactctcctcggtttctctccggttctcttctgctaggggtccccaagccttcgagggagccgcgagactccgctgccctagccctaggcagagttttccagcagcgggcgccctgcaccccgggaggggaaactttcaccgggcccggagcccagctctgcgctccaccgagcgcggcgcgtcccggctccagcgacgtctccttaggtctctcgggaccgctgcttccctccaggctctggggcacgaagcaggcaggaggcgacagtggggggtggcttacatacgccccagctccaggctgttctgctctccatcgctctctcttggcctccacgtagcgaaccttcccatccctccggcggccgcggatagggtgcagcgcggccccgcagcggcggctgcttcttccatcacccggaggatgtcctggcgggcggctcaggcgagccccggcgctccgtggccgcggactggcccaggactctgtacacctagctgaaggcaaaagagcgggaccccccacccccgcgtcaccagcggcttctgccctacgaggtcccgaggcagaggaagcccccgccgcggccgcactaaagcggcgcccgggaggatgctgctacccgactccccctacgccgggcgcctgcaacgcgctcgggccggcctctgcgcggctcctgccagcccgctcggggttggtgcgcgccgccgtctgtcgccccggctcctccccttcgccgtgctcccctcctcctctgcctgtcccacacccgccctcctcgcagctccagactcccgccgccacctccttaggggctggagatgcgacccggttcaaggaggcgctgctagggcctccagccgttagtagcagaacagagctctaggtgcgcccggggcgcggcgccggcgcctgattcccagctcgcccgcacagccggagacttgggttctctgtagctgcacgactcggctcccaggattcgctctggagaagagttggtgataaaagtttgagcagaaataccccggacgtacgctcctttc

SEQ ID NO: 35210 - DNA, 2204 bp, Mus musculus
cccatttttcattatgagaaaacatgtagaataagctgttaaaattcacagtggaatcaagtggcaccacttgttattccagcattgaggccacatgatggtaagcttacaagttgagaccaccctgggcaatagagagggatcctgtctcagaaacagggtccctgggaacttaatgggatcagaaactggtcttacaagaaggaagctgttctgcatatttttttttaaataatagcttagttttcatatctagagaacacagcataatttttgtgagttaaagtgttcataaatgattggagagttacaagaaagatggctctggctatgtaacacacagccgtggtcctctactatttgtatgaaatgctctgtcaccatcctacaatgttgctaacaaagggatccccttccagcgtggtgccacttgcttctctctgcagagaggcagaagtaacatgttccaacaaaagacctgtgactaaagagggttgtgagggtagttttcctttggcactgtagttccgtttttctgtgagtctgcatctgcatcactacaatcttctaattgtagtgagttagagattaaggaactagggagacagaaagccctgatcccaaaggatccttttatttggttcacaatatttttggctttttttactaaattttgcagaaattgctctatcctgacctaattttctttattgcagaccattcctatgggcttaacctgagaattgtattctaactaaagagtgttggaaggaatacttccttctgacctatgtattttccccattctttaatattcttgagtacttgaaaacaccttaagagaaattttgttcatgatcaaatgtaggtttattagaaatatcctatacacttgccttgatggtggtgtaagttctgagaaattgcatgattgtgttaatagtttatcatggttaaaaatacagagagacaaacctgttgccaaaatgagttaacctatactgatgacaactgtgtgatttctttagccgagaaagttgtttttaaaaataaactaccgcttttctaaagcactgcattttcaaaataagcttttgtttgttgttcccctcttctgactttgagtggacaagcctacaaaaacttgaatgccaggtatttgtgaagacagtataagtttaaagggtcttgtgatgaaaaactcacattaataaaatgtttggggttttcacatttttcacgtgcatgtttttggaatagattttaaggagtgcttatcattttggatttttttctgtttttgttaccaacttcctaagatttagctaatacacgaagacaaatcctagggaagtgtagtggtagactaataagaggtgggaatgtgctgctgttgaaagggagcctgttcaaatgcctctgtttattcagtaccacctcctgcagctctaatgtaaatgtattatgtgtatatgtatagttttgtagataaaatgtcctcgttcactttcgtatataattgtgtttagagtatcagtgttttcattcttttaacttcaggctcttgtatgttgtatctctgatttgaaatagcagagaagacagatttgtagacatggctcagctaaagtactctgcagtgggacagatgccgtggaaggctggtggcgctgccttctggatgacactggcactttatagttttctacggaaagattagtcgcaaacaaggcttgtagaagtcactttgttgttgtttttttaacttttaattacttaaataaaacccattgttttcatagtaaatttagactgcttatgtaattttctgtatactgttttctaatgggaaccctatatggcaatccttctttcagccgttttctcctgtgcgaactagttatggaaagagtgttgtctgttcgttgtagcaacagagccactaagttttatgcagtaaaactcctaccaggtagttttatgatacgtgattccctactaattaggaaatttcatgcccttattttctttgttaaggagatctgttctgtttatctcactgagaaaaacttcaaacccagaatataacagtggccatctcacctccaacctataagtatcagctccttagtatatctgttttgtttgtaaacatatcatgacatcatcacactgaaagctcctggttcctttttaaggttttg

SEQ ID NO: 35211 - DNA, 2236 bp, Mus musculus
tgcttttcaggttgtgtgaatggtttagttggttcttggaatttgatcttctgggttagaggttcaaattttgagtggagataccagttacctggagagcttattataaaaatcacacattctcattggagcaggataaagactcagaaatctgtcttttaaaacaaatagtgtactgatttctcatgaatagtaaatgcaaaataaatccatgtgtgtgtacatagtaaagaataaagttgagtttgctgttttatttagttgtggcttatacaccctcttagagctgttttggtagctggttacttaacgttcttgtttgtttacaggtcgccgtctggttcaaggacacctaaaaggtctaggcgctctcgctctaggtcccctaagaaatcagggaagaaatccagatctcagtcccggtctccacacaggtctcataaaaagtcaaagaaaaacaaacactgacgtatatttctaagatgctgtcacttattggaaatgcaagtttgttttgtgtctgaatggttttttttttcttattaaaaaaaaaaccatacacacaaaaacaaaaaaattctaatgaaagagcattcctgggttttgtttgttgtttgtttgtttgtgaatgcatgtgtaaactcatgagtaactgcatctgtagacctgtcattgttttatattgtataaattacttttgttgtggctgttttctcaagatgaaatttttattgtgctaatgaatttcatcagaaatatgtccaatggatctgctggcagtagtagtattttgttttaggatgttgtgacttagacacataatacagatgtcttccccccttttgtagctttgacaatttgaattagatttcaaataaaatctgaacagaaaactataatgttgtttttttgcccagttggtgacaccaagtcccttaaagacctactaagtgaatttggcaccattgctgtttcttatccctagtgcactttacaagctccagtgttcaagtagctagtgttttataattactaaaatgactttcacaagttaagggacccagtactcctgtaggttttgctcattcatttctgtaaagagtttcatacctagagaacagaaggctcgaatagagcgtatgatgtgtatctgttactgtagtgcctggttaaaacagttctttctcaaagaagcaacatgacttcaaaacactcagcccatcttctgagcaattaacgtatttagggtaaatttaatttttatcttctatcatgaaacaagtttatttataaaaggttttataaaaaatttaccatagaattcttttgtataatagttgcctttttataattgtctgtaggttatctttaaaacactggtatcatgatatttgtacaaatttgtttgaaacagctttttgttttgaaggatttggtttgaagtacagctttaaataaaaattgaaaaattaaacggttttcaggcaattttaacatccaatggtttataaattcaaggcgcaaaaagttgacttaagtcagcgttgaattcttttataaacaggaagaaacttggctgtggtctggggaagaaataggcaaacttgtgactgttgatcacagtcccacagagacggtaatgctgtgtggcctggacctgacgctagtatctgtcagtcttgctttcagggttccatctaggctctttatgcagtgctttatgattttctgtaataatggattgttgggatttagcttttttttttttttttttaaatcttttcaccttgtttacttaatcttgcccagtcacaaaataaggtgtcttctacccatgatttgaggagtagtcctatcagctgtacagtaaggcatgtcttttccttatccagcacaactacagaagcttgagaaatgagcccgtcataattgctttacattgaggttcttagcatgaaagtaccattcagtcctttgtttacctactttattaggaaatgttaattccttaaagttgcagaataattaatgtgaacatttggtgctgattcttaaagatctatataaatacagccattacaagaggaatacatttttctcccatgttcgttatctgagagaatagcattttatatcatctttcttttaagaaaaatagtgttaaattgctggtagttgtggtattccttagtccctggtctttagatagacaaggaaataatgggtcagaaagtga

SEQ ID NO: 35212 - DNA, 1146 bp, Mus musculus
agtgcagtgtttctcttccactgctctttgtacctgctcttctctttctggattttctgtgttaccagacctcagcctaagtgtaacttcaggataaccttttgacttctttaagggaaatttaattattaaatagtataataagatggtgatgtacactttcaatctattgttctaacttattttctttttaaacaaacctttactaagctctttggcagacgaaccaagcctgatacttttcaccatgactcatatgctacttgatctcaaggataagcctttaatatatattatgcaaataagtgtacagatagttactgtctctgcagtctggataataaaacatatttacattgtgtctggagataaggctatctagtcatgttgctctgcactggattttaagttaatctaacagtgagagagtggtgcatgttttgcaggatgtgccggatgatcttgacggtgctcccatcgaggaggagcttgacggggcgcctctggaggatgtggatgggattcccatcgatgccactcccatcgatgacctggatggggtccctataaagagtcttgatgatgatctggatggagtgccttgtaagtttggactttaaacattcagactaacaggtttagttgccaaaatcccttaagtttttcacgtgatggtatggagaaatgttttaatttttgactgtcaagtcactcaccttttctgacattttaaaatttaggtatctagcaatatgtttgactgtggcaaaggaaagagctttattatggtatcttttttgggggactatcatcctataatattagcaggttttcctttttgtctcaattgtctgaaagttacaggcagtatcttgtgttttacagtcacatgcccagtgtcacttcctttgttttttttattttcctacccacacctccatatgcttctcttgtacccaaattttctatgcagtagttcttcacacccattttgccttgctcttgatagataaaagttacccactgccaattctggtctgcaaatatcaaatggagagttcaaaaaatttcataaactgtaggaatcataattcattctaacagttctttcgtgttttattatttttttagtgttcctaatttata

SEQ ID NO: 35213 - DNA, 1149 bp, Mus musculus
ctgtaaatgttagtaaatcttacttcagtttctaagtctatatagatcatccacccatcctgcgtactaggtttttgagctgggtctcccgtagcccaggctggcttgaactttaaccttcagcatcctgctgctccttccttgtatttcccagagttgggattacaggcatgtgccaaccgcttccagctcccttttttttaaggaactagaaagcactgatttggattattaagtgttggccatcataatgaccactcaaattgttgttgtttttttttaatttcaaatgtaagtctagacattattagattataagatcattttggccttagtacaatatttggaatttccaggcttgtattctgtgctgtatatcaagtaagtagagacttctgtttcatgctcttgctatggtagttacatttccatcaatttgggtagaggtgtttattagtcatttctacacattgaaagaatatttgtacaagatatagggtttttaccattgaccatgatgaagtctctatcttttacaaaagtgtgcatgtctgtgtgcacacatgtgcaccctcatgccgcagtgtagatgtgacagaggacaacgctaggttctaaggatcaaattcaggccttcaggctgtgtggcctatgtctgcattctctgagtcatgctcatggccccattagtgtttcttaattacaaaatacataaaccactagttatttttagctttaaaattaacttcatgatgtacacagtgtatgtagttcttgctaaggggacttgatgggggggcacccttccaaagtcccttttattttatgtaattgttctatacttttcatttttaatatctcctggtagacactgagcacatattttagaaataaaatttcctaagcaaagtatttcatggcttcaggagggggtttggagccatattgtagctttgtttcagagcagtaagacagaacgtatggttgttaacctgagatattgctagatataaaaaaataagtttaccaaaaatgtgttattttgccaggcagtggaggcccatgcctttaatcccagcacttgggggacagagggagaggcagaggcagaggcaggtggatatctgagttccaggacagccaggccta

SEQ ID NO: 35214 - DNA, 1172 bp, Mus musculus
atacttcaaaccattacataattcctgaaagggtgctgatcgtctctctgtgacattgataatacggctgaccataataatgtcagtataattagcttccaaattatagtcctgcgtcttccctcgtggctcttcctctccatcatttggagtctgagcttcgtttttctggtttgttttctttcactccatggaatgtttcaccagcattggagtatttagaacccactggtagtcctgtccaaagaagaaaaacagcaggaaaatgaaatcctgaggaattctgtgcaagcagatggaatgctctcaaaagcaccgcctctggtcttgtcacagcggcccctttctcctctcgctttttaatctccgctccaaaagcttttatgtaacgaatttttagggcaagaaagttcagccagttttcaaatggaaaatattttattagttgctggtggaaagtcagtgtctccccaaaggagatgtttttaccatagtttaaagtgatttttagtgtgagtgaggcagttctttaccatctcagatgcaactttttaaaggtaggcaaacatccacgtgtgtggcactgatgatccagcggctgctgggtccgacagcaatcccattgctcctgccagcattggtcaggtaaatgcataagtgtcttcttgggctctcaggaatgaatgccctttatttaatggggattgatttccatcatcttccctgaattaacagacagggttcctggctacctattgcccagcaagattgggtagcagctgaacgccaccattgttgatgacccagggaaatgcccttagattcacacactggaaattgtctcaaaggtactgcttgtaagaggaatgattccttacgaaattaaaatggataattcacgtgaattatttaggatactcttattagttctagagcaaaaagttaaataaataagaaagaaagaaaagaaaacctttaatattcacatttcatgcatcagtgtttctctgcaaactcttcaaaaattaaccacataccacacccccacatgcctgtgtcaggagtgtgcacacgtgcattcacacttcagcaactcgaatcagttcaatatgaatgtttatctcctctcaaaaggagaaatctacctatctcatgaacacacacacgcgcgc

SEQ ID NO: 35215 - DNA, 1203 bp, Mus musculus
agccggcacagttatcacgaccgtcactcgaggtgggagcttgcacgccacagtctcgatcatcagcatctacagggaaggcaacctggccattcagcaggctggcaagaacatgagtgtcaagctcactgtggtgtgcaggcagtgcccccttctcagacgaggtaaggacagagctgtagcctttcttctgggaaagctcagaagcagagtggctgttgaggggaagtgaagtaagggctaaaacacgatccacttctgataaagaaggaagccattaataaccatgaacacgaagggaagaaaaaaccagttatctttcctttctctttctttaggtctcaattacattattatgggacaagtgggtgaagatgggcgtggcaaaatcatgccaaacagctttgtcaaaatgttcaagaataagaatcagaagcccatgaacgcactgaagaacaagcagtgttagcctgagctctgtcacataacctgaacttactcatcaccgctgaacgatctgtccacgttaggaaaaaaaaaaaaaaaaaaccacgctatttaatgctgagcgttctgagagatggagctgagtaactcctcacgcgatggatgtgtgagccacgcccccagttcactggtggaaggtctgcgcctgcgctgtgatctccaacatctgcgaactcacccacccagtgcctgatggggaagagcagcgagctccgacatctggaagcttgaacatacatctctgtaggaggatattctagagtcgagttgtatgaagatatacaaaggattttataaagtgcaatatttataatgatatttggttaccttcaagcatttgctctgaggtgtcacattctttttttctctttcatttttttaaaagtcaatgcttaataaaatattttaaatgattataaggcagccagataaccttgttctcccagaaaatacaactgtggagccagtcccgtgaaacggtgctcgaggtggtatttgtacataaagttgtcgctgtatcagcttcaagttgtcactaagagttccagggttaagactgatgcagtgacgtcagtggactgtagtctctgtctgcaagaacagaaaggtgtccctctggcatccagtccagactccttcattttgtctctgaactgcaagctcaggtatatacaagggaattccccagagtacact

SEQ ID NO: 35216 - DNA, 1155 bp, Mus musculus
aatcttaattaatatattatttttgtatgtagtcaaagaattgccatagttcagccaaactgaacagttttaaatctatcccaatgtagataaaaagttgatagtatattgcaatttttgttttattttactactataattactggtgtgtgtgtgtctgtctatatgtctatattgtctacatgtgtgtatgcatcacaacaaatgtgtagagatgagtggcagtgggttctctcttttcatcatctgggtctgcagtgaccaaactcaggttctcaggcttcacagcaagtgcctttatttgctaagctgtctttctgactttttttgttttaaatattggcatttacttaaaattttgtgccggactttaagcctagggcctatgtatgttaaataaacactatttatgagctgtaccccaattctatattttgcttgaaacacatttgtatcatatattaataccttctgctgtaattatacttacttatagaattattcatgtggatatggacaaaaagagcatattatggaatgttctgaaacagaaagccgaatcccttcagatctctctcgaatgtggtactctcaagaattctgttgctgaggcattagaaggaatcactgttgtattacagctgactgctctctgcactgttcactgttctcatcaagacatggatgggtaaaaaaaattcaaagatttaatttttttttattacgtgtgtatgatgtttgttggtgtatgttacaggatatttgatcacactgcgaatccaagattgtgttattcactgagaaaattctgtttctagttgtggtatggcccagtccttagcacaaacctttaatccctctggctggaatacagtcatgcccttagtacatacctttaaccccaaacagtgaaggtaaagttagtttgtagaaggacgcacccatgtttgaaagtgatgtctaattgagtggcagcaaagtgacaaatctgagaaagacttgacagaataggatatgtccagctctcaccacaagagaggggaaagctacttaagaaagcaatacagagagcaagcgagggagagagggagaaggtgaggagacaaattgcagagaaaacaaggtagacagagcaggtgatgacagaagaagcca

SEQ ID NO: 35217 - DNA, 1142 bp, Mus musculus
atcttagaacataagccattggtgttctgttcaggaatttttcccctgtgcccatgtgctcaaggctcgtccccactttctcaactaaagtaatttaagctggtaagtttgccagctgtcgtggcacatgcccttttgattccagcattcaggaggcagaggcaggtggatcttcgtgttcaagatcaactggtctacaaacagaattccaggccagccagccaggtttctacagtgagacctgtctcaaaataaacaaacaaccacagagccaaacaaataaattaataagttctattttaatttccttaaattatatgtgccatgtatatctaaatattcatatataaggcaacgtggagttgtttgcagtattttatttgctgacagtgtttttaagtacaactttgttatatgatgtgtcaaactagaaaatactatctcactttagctttcatagacaatctacatcatctttgtaagcatcttgattttcaagaagatgaaagagaggtaaaagcagttcttgggactttattaaatttgatggaagatccagacaaggatgttagaattgcttttagtggaaatatcaagtatatattggaatccttgaactctgaagatggattcgtaaaagaggttagaaatcttaaattaaaacctatgatttttataaacctaggtctagaactgttctgaccagtgaactttgcttttctagctttttgtcttaagaatgaaggaagcatatactcatgcccaaatagcaaggaataatgagctaaaggatactttgattcttacaacaggggatattggaaggtatgtttgacagtatttgaattgaaacttgcttatttttgtccctgtcttatttgcctgatattacagatgtgagggctggagatggagtccagtggcagaatacatgccgactgtgcactgaaaaaaaaaaagagagagaagaataaattgtgatacaggatatatattatgggaaaatatgatttccatatctttgtgtgtctgcattagtttctgagacactgacttccccatgtttttattttcagggcagcaaaaggagatttgatacctttcgcactcttgcatttactgcattgcttgctgtctaagtc

SEQ ID NO: 35218 - DNA, 1172 bp, Mus musculus
agatattggatcactgaattaaatttcattctttagctactcagctatgtttttgtgccttcaacactgagtcatagacagatagtatgactatcatggcttctatcacctagataaaattagctatcactttacaggtttgttttttactgtatttactatatcaggccctcttacattactaccagtgttatataaatatttcatattcatttatagtgaataaatattttactttcatgttggcagtaaagtttaattctcatacatttgaatttagtttttatatatccttcagtttaacaagaaatcagggatgacatcaaggtactgaatgatttagtgtaaatacattgttgtttacacttaagtttaatcatataaaagttgccgtttatataccaaaagagtgttaaaaggttactttttcatagctgatctaaagtgcatacttaatatctgaggttaataagactgaacattgtaatattttaacatgttctgtctgtcttcagattacacatgttgtgtgagttggagcacagcctcaaaccgctttttcgcaagtctccaggtgacagttgtaatgaagactctctgaactggggagctcgacttgaaatgacccagaattcctatagagccaaggagcctatcctggccctccggagggctttattaagtctcaacaaaaggttgttcatacttctttaaaaagtcaattgtcttaaatttaatatatgttcatactttcttggaaagtgttttttgttctacatctacattttctgtttttagttctgggaattcatcacatagttgaaacatacctagaccataataatcatttttactaaggactggagagattgctcagtccgtggtaacaacacttgctgctctttcagaagaccagggttaggttccaagcacccacatggtggtttacaaccatctgtaactccaattccaagggatcggataccctcttctggcccccataggtaccaggcacacatatagtgcacatatatataaacagacaaaatgcttatatgcataaaagtaaataagtaaaacattttaagataaactgaaattttaaaatgtttttaaaaaatctaaagaatctgttttatagccaaacatgatatttcatgcctataatctca

SEQ ID NO: 35219 - DNA, 1196 bp, Mus musculus
atgaacttgacacacttacttattcgatataagtgtttacatgttcaagtgcctactcctttatctgaaaccttaggtctttatcagaaactacacttaggaattcatttttttctcattttaaaggtattcatacttatattggctattgtaactgatgataatgtatcagaatatcccataatcaaacacacatagcattcgaaattcagtatcattttgttgttaaatgagatttggtaaaaagttaattacagattttcttatgtctgataatagatctctggtttctactatctcctctggtccttaaatattcctgtgatagaggaatgttatttataaggtaaaagaggtttaaatgagatgattaaaaatacttagacatttcacattgttgagtaattgagattataaaagtaaaatatttactgtgattaaagttctataattcaaggtaaactcagaaaaattgaaatatactgtttgtttttcaggtcgatggaagcaattccacattaagcatgagcactcactttaaaatgcttaaaaggcttgtagaagacccgaccttcagtgagatcctcattcccctgcagtcagtcatgatccctactcttccgtcagttctgggtgcccatgcgaatcatgacccctttcctgggcactgggcctatcttgcaggcttcgatgatgtggtaaacttctgttctatataactatcatttttaaatgtagttaaatttataccttcaaattaagctaaaaatttaggtgagtattaaaaaagaaaactccagaaatgtacagaagcgcaactgtcttataatatagtacaaagttaagtaataaggaattataacaagccaaaaattttgattttctcatgctctttatttcactatgactattttttttcataattgtattttcctatattttcttttgtcttggaaaaatggagagcaaaagtaacaaaatatgtttttgtttcttatgaggaaacaagattcagataactttttcgtttgtttgttttgttttgtttttgtttttgtttttgtttttgttttttttcgagacagggtttctctgtgtagtcctggctgtcctggaactcactttgtagaccaggctggcctcgaactcagaaatccgcctgcctctgcctcccaagttctgggattaaaggcgtg

SEQ ID NO: 35220 - DNA, 1157 bp, Mus musculus
tgataaagtcataatttatttacatttcattctggttattcttgatgtcatgtgtaaattaataataataaaaaaaagctgtcttaaccagatttgtgaggctttctgtggtttttgtttttttctaatcatttatagacttagcgcctttttgtctttgatctgatttatgggtattttttttggtatggtgtgaaatagaagtttactttcattcttttttctatacaaactcacttgtcttgacaacttttgtttcagacaaggtgctagttactacgtagctctgactgaactggaactcactgtgtagaccaggctagtcttgaacttgcagagatcctctgcctccctaagtgctgaggaatatgtcaccacacttggccatcctttgccgataagactctttccaacatttaattgtgctttttattgagatggtcagttggttttcagtacttctaataagttatatgttaatatgccaattacccatccactgtcttgatgactatctttataaaaattttcgaaatcaggaagagcattctaattactttttttaatcaagatttttcgacttgcctgaatccctcacatttccttgtgaattttaaaaccaccaattaccgcaggaagccgtcttggattttgataggaatgaccatgaatttgtagttatatttgtagtgtagtaccatcttaacaacattgttttctgaactataaatgtttttctacttaattaaatattcattaatttcttgagacaatgttttgtagttttaaatgtacaagtcttaactttaaagttactttcctgaagatagagcgatagttcagtggttaagaacctgaatggagtagtggtagcagagatggatgagtgaggggactctgaactggttttgtatgtaaactggatggcagatgaacaccaattaaggatgatagtgtatattttgtttagggcaagagtaaaaattatgtttgttactaatttaggaatatagaaaaatagctcaaaaaagacaatgaattttgttttgaagataatttgagatgtttgtagtatatccaaacaagtttcccaaggcagttagagttgatgtctagagcatagaaagatgtgagattaatctgtatggtaactgaag

SEQ ID NO: 35221 - DNA, 1240 bp, Mus musculus
cacatggtggctcacaaccatcagtaatgggatctgatgccctcttctggtgtgtctgaagacagctacagtgtactcatgtacattaaataaataaatcttaaaaaaaatagtttctaaataaaaatgacagaattaaagctaatattagcaggggtgaggggtgtgcacctataattccagcattccttaggctgaggagggagcatcttgagctcaaggctaccctggactgcttatattatgtctcaagacagagattgagaaagagagcgtgagaagtaactcacagtaaaggtagctttgctccataactaaattaaaggagcaggagaaatgagtctgctgaacaagctgtcacaggcttgtaatcccaacagtggaggctaagaccaagtgggttttaattacaacattagtgacatgctgtctcagaaaaaaggagaaaatttttattgaaaattataatatactaaatacattgttacaacctagtaaagtaaggaaatgttgtaactacgttaatgaaaagttatattgtctctcatatctcagctttcctgtttatattttcacagcatttgatgaccagtgaagactcgccaattatagaatattatccacctgatttcaaaactgatctaaatgggaaacaacaggaatgggaagctgtggtattaataccgtttattgatgaggtcagtatatgaaataattacatataaacacataggctttttatttgaggcaggcaaagaacatcttaggtgtaattcctcagataccatcagacaccttgtttttggggctcgcctcctagggaccttcctgtctctttctacccagcacttagagtgcaagtgtgtgccaccatgcccagccttttacatgggcaggttaggaatcaaactcagattttgatggtgtttatatctattaccaactaagctgtctccccagcccccatcatttgttgttttgatgatggtcgttctacatggagtgagatagactctgagttcttttcatttctctttccctgatggctgagactgttgaacgtgttttcatatattcgctatttggaatgattctttagagaactgtctgtccagttcatttccctagttattaaatgattttttctatgtaatttttgagagtcactatagatatagtcattctgtatactaatcccctatcagatgtatagttagcaaagattttcttccattttata

SEQ ID NO: 35222 - DNA, 1141 bp, Mus musculus
tttctgttgcttatgttcttaacgcttgcttcccgccatctgattatctctagtgctatctgccctggctgtatctgactggaacctgtccttcctgtgatcctggttgtgtcagaactcctgagttcagctgcctctgtgatcctgtgattctgggatcctgtgatcctaagatcctggttgtgtcagagctcctaggagtcaagctgcctctgggcccttgagatcctggtgtgaccaagctcctgagatcctgagatcctgtggtcctgggcgtgttagagcccctgggagtggagcttcctttgggtgttgtgagactggctacggagtttgcacccaaggtctgctcatggcaccagcccagaccagatggaacctgtgccacttgaaaattaccttttattaaatctctccagcctctgcttttacttcctcttgcagattcaactatagcaagttgtttctttttgccctctggctttctcttcctttcatcaaagaatcttgaggttggaggggttactcaatgggtaaagtgcttggatatgaacttgggtcctcagtactcaaggcataatgtcacatgtctgtagccacagcgctggtgttttggagacaggcacatcctcggggcttgctggtcaggcacatgtcactgaagcggggaactccagggtcagtgaagaaccttgacaaaaaagttagattgagaagtattcgaggaaggcatgaggacatgagtgtgtaagcgtgcacatgtgtgcatccacagagaaaagaaacaatcttacgttttactattgtgcccatttataaactgtcttaattactgtgggcttgtgggtcttgctggaaaattgtgtttcatttgaaaatataaacattaattttaaaatccactatggaggaaagaacctagaaaggaatgtaaatgagttaatatcctcacctttcataaaatacaagaaagtattcattttagagcctttttaatggaagttgttaacatcagtgtgtcaagataatggagggggtgaatgagcgggtccagccacgttcttctgttacgtgtccttatctccacttacactaaaagtgtgtttgtcttgaagtaagcctagagaaagttagagaaatt

SEQ ID NO: 35223 - DNA, 2535 bp, Mus musculus
gagctattgagcgctgatgcggccagtgctgctttgttctaaatcttgtaccaaagcaactttagaagattctccagagcattcgtctgactgcttcaaactaggaatagcaatctagatttgaaaaataacgaatttttttagattattcaaaaaccagcattcagaattcctaatagaattaagtttcaaaatctccagggtacagcgattacaaatcagactgcaatagagtacagtacagaacgttaatcactatgcttttttaggcttcttgggttatatttgctttgttgatatttttttttcttttgagacggggtcttgctgtgtagtcctggctggccgggtactcatggtaatcctccatgttctgagattccagcatgcgtcaccacacttccttatgtggctttttctctgcttacttcacatatgtgaaaactcgttgtgggtctgtgtgtagagcttcctgggactggtaaaaatgtaaactttttaacaattccaacatgtctttttgtgtggacattttttactgcctgtcccattctggttgtgcattttagcacctgctgaactgctcagtgctgttgcattttgtctctgcgtgtcactcctggatgtgtgttgctcacactgttgaaatgatttggaatttatgaaattttctcaaggacatgatggcgtgcatttatatataaacatattgatcttttagttttgtgatatgcttatatttttaaagagtaaaaatgatcgtactttttcaaaagtaggaaccagtctttatatggagctgctcattgtgtgtatttaatttacgtcatggagactctgccataagtcttaaaatagtcttactgtttcttacaaatgctggtgttgaattcctttctgtgctaatttcagtgtttctctaggtgatggcaggatatatggatactagtagtgcctttagttaagaggtaaatgatagctatctttattttctatggtcatgtgaatttctgtaactttgtcttctgttagtagaaacttcttgctggggcactgtgggaaggttcaggccattcgcagtgtttgcctttgttgctcccaaactctgttttcaagggacgcatccattgcagacgcgagggaagttaggctgtggcgatgctatggtaactccttccgagagcgttgaaatgtgtagtatttgttacctcacttacgtttgctgtaccctcgctcgctcctgtgggataaattcaccgtgctgcacaaccatgtcccctgtcgaaacagaggaaggagttgttctgacaattccatgagaaatttgagtaaacacagtgccattgaaccagtgaggattctccaaaaactgtgcacaacaagctagtaattctgcatggaaagcagagtaagaagagcctttgccttccttttaaaaatagagagcaaatgctaagagtcaagcttgcaaagaaaaggagaggattccgtcctggcagctagggagcagcagcagagctctgaggacactggatctcctgacacgtgtctgcgggggaggagcacatctctgaaacatacatgggctgtggcaaccatatagccagttgggatgagtcagtctgaaaccaccctcgagcttttaaaatatgttcatttggctattcaatctaagaacctttggaaatggtgggctgtggtcccagaaggaacacttcccccagattgtctgtttccgtgtaactagaaaagttatttatttgattaagccttcctctcctcactggaaatgattgttaatatctttgttcaacaagtctttctttgttaagcaaattaagttcattagaagatgggtcctttcagctgtgtctccctttctcaattttgtacatttcctggccaatggattcattgacctaagaacttcatagactaaaggcttaaatatctaaacctcagttgtgtcaaaactttattccctctaaacctcagtttaaattacagattttccttctctgggctcagtagtgcacgtctccagttccagtgctctggaagctgtctatagcaggaggttccgtgaattcaaggcagccaggcagtaatgaagtctgaaggtacttcccgccttctgtgatgagcagaaggaaggtgttgctgcctctcaacgtgtactccattcccacaccgagagtcccgtgctcactttgtgactagagagttctggagtcttggctctaggggaggaggcgaagagacaggtgagatgcagtgctgtttgcagagtgtaaggtactgacttagcttaaggaaatgaactagagagtcatcttatttgctctctttttacgtaactattctttttgaatcaacaaatacttttcatagtggttatctagttcccaccttatatagcagaactccacagaaggtagcgctcacacagatcttctcggataaatgttctttgtgctatcttgcttccagatttttcttttattatagaagagaatctgttagaaattactgata

SEQ ID NO: 35224 - DNA, 1222 bp, Mus musculus
ggaactcagggaaattcatctgcctctgcctctgcctctgcctctgcctctgcctctgcagtgctgggataaaagcatgtgctaccaggtcaggcccattggcttttcaaaacatagagcatgtctcaagggcctcggcagtaattttgttactgcacgcgtacatgttacattgtttcaaagggatagtggtttcgtgtacatgttacattgtttcaaagggatagtcggtttggggtaggatctattcaaaatctgattctacatgctacaaaatatttctaagggttttgttttgttttgttttggggggtgggggggggagtgccactctctgttccaggctggcctgaaactcatggcagtcctcctgcatcagcctctcaagtgctgaataagccacggcccagttaatgttacataattggtatgtgctgtgttatgagaaccaaagagaatgcaagaataagttccatttagttgattgtagtttgaaatttctttttttatttgttttctcttctggtagatctttttttttccccctgtgctaggactgagcctggaccttacacattctaagtgtcccatcaatgcctctaaccctctgtggctggccttcgatgtagtgtctgatttgtactttcctattcccatctttcttaggaaaacaggccatcattttcacaacttcattagctggcaagacctaagggcagctgaacttgtaaagtcctggaataattctctcataatgaaggtaatttttttaatcaaatgggtttttttctttttctttttttaagatttattttatttatgagtacactgtagcgattttcagacacaccagaagaggatgttggatcccattacagatggttgtgagccaccatgtggttgctgggaattgaactcaggaactctggaagagcagtcagtgctcttaactgctgagccatctctctagcccaattgtttgtttgtttatttgtttttctataaatgtctcttaacttcagatttaattgtagagtctcctaccctttaagttttaggacattaagacaaagagccagtcagtgaaatgtaggagtagcctacccaaagcattggtggtagatttaaatgcttttctacttactgacccttggggaggctggagggaatttggggtagacctgtgcttcacgtgctcaagagatctcttacttctgcctgg

SEQ ID NO: 35225 - DNA, 1700 bp, Mus musculus
cagaactccgcctgcctctgcctcctgagttctggggttaaaggtgtgcaccaccacaccttgcaacattgacattttgaactgcatctgactttgctttgggatgctatgctggacacagtgggatgcttggcagtatccctgacctccactgttcagcattcccctgggttttatggccccaaatgcctgccaacattggccatcctgggaggcaaaaatcattgtcatttgagaaccactgatgcaggctgttagaataaacatgaggatttggtgaatatagtcacattcccaatagtctatgcactgttttctcctgggaaatgaattcttaacagtgaaaaagtagagagtatcctaaagtgcggtttcggttttgctcggtaatgaagaaaaagtgttggttggttgtgtcccttacccatcacctctgaagatggatcaaacctacagccttgagcctgatagtcaactattccactactgagctacatcccatcccgtaagtctcttgtagtacttatgtacctcagctctgctcctgtgtgttcacaattagtggacatttggcctcacgatatgacggttatattctgtagaccatctgttcctacccctgcacttctgagacagggcccaggttggtctggaactcatggcagtattcctgcctcagcctcctgggtgctgagatcacaggcatgaatcaccatgcctggctttgcttcagttttatctctgaacaaggaaaggactaccactgtcccaaagcttcactcgatgcttcctgaagccaaagccacgtttgctccccacagaacttaacactgtgccttcctgtctgtgggtggatttttacttcacatttatctttgatcttacatttattggtagtatcttatacttgtctaaaaggaagatatctacagctaggggtgtgatgtttattgtttaaaaaaaaaaaggttacatgtctgtatatttcgagtatatttttgtagagatatacatccatagatacacatggtataagctggtctgggaattcaccccagagtctggtgcatgctaagcatgcccagctactttgaacttcttaaggtatacttgaaactttcatccacagttttatatgttagactgcagctaactagccttgtgttgtgcccaacactttggtgctatagaagaaacctcataagtagcctcttcattaagcaaacacctatctataccagggaccagtttctttgtgttgtgtgtgtgtgttcttttgttttgtcttttaaggttttttgtttgtttgttttattttttttgagagagtgtctcactatgtagctctgactatcctggaactagagatctgcctgcctctgcctcccaagtgctggtattaaaggtctcctcccggagctactgggcctggatttggggactggttatcaaggtaaactacagctcaagaggctggcaagactttttcagttcatagaaataattgctatgcctcagagtcctccaactttgagtctacggtcaccaaaactagtctaaagaaggctcggatcagctcgaaggagtctggatccctttgggaagcttcgattgtgctttttcgagtcagggcaagaagcttcaggcataccctgaacctttaagattctcctgattgggaatccaaagcctgaaagagg

SEQ ID NO: 35226 - DNA, 1169 bp, Mus musculus
gagagagagagagagagagagagagagagagagagagagagagagagagagagagagagagagagagagaaagggaataagggtctgaggacagagagacagagacagacagagacagagacagacagacacagagaaacagacctaattgtctggattatatagggaggagcctctgagggaagggcacctcagcccctgggatggaaagttcaaggttgaaggcagggtatgacatgtagggactgagggatgctgggagaggccaggtctgtaaaattttgatatgtaaaatatccacctcagtctcttgcttctgggtcctaaccaagacagaactcaactgtatagaccagaatggccttaaactcagagatttgcctcccaagcactgggagtaagggctagtaccactttatcccagtccttaattcttttttaaatagaaggaaataatacttttgttgtttgtgtgtgtgtgtgttttgagacagggtcctccagagctctggctgtcctggagctcactatgataccaggctggcctcagactctcagatatccacctgcttctgctccttgagtgctgagattaaagactgtgccactgggccctgcaaagtgcacatgcctgtggaggccagagtcactggatttcttggagcttgaggtacagatggttctaagctgcctgacatggagctgcataatatacattcttaatcactgagccatttttccagcctgggaaagaatattttaaaatgtcttccctagccaacttttttatttttaagtactgtactttgagtctttaaactacaaagaataaaaacagaatttaatatgtactttaatttattaaatgggttttggcagtatttttaggaacgttaaattaataccttacttctaagataaaacttaggctgtcatagtgagactcaattggcctttatctaatttttaactgtacagttaagatatgggtgtaagtacactatagctgtcttcagacacaccacaaaagggcgtcagatctcattacggatggtcatgaaccaccatgtgattgctgggatttgaactcaggaccttcggaaaagctgtcagtgctcttaactgctgagccatcactccagcccccaagatatgggtgtctaagtttg

SEQ ID NO: 35227 - DNA, 1242 bp, Mus musculus
gtaaattaagaacgatttatttgtttatacaatctggatgccatctgagaggaactcataagctttgtgagattaatttccaattaagttttgagcatttttacagccataagttctgatcctgtggtcacacccagccacctccatctcctgcagccactcagtggctgtttgtctgagataaaacgcgctgctttctgttccttctcttcacggggcctaggaacaaagctaacttgccacagaatggttagagatgggatgagcattgagaccctagaacatgtacaaagggattggagacacggattactaagcaagcaccttctcttttataaaagtaaattcagtggggtagaaaaactattattttcttaatttgaaacacagtagttcttcccaatcagttgaagctcttttaaaaacatgaatttctacttagtttttggctcagtaggtgtccagtggatccctgaaatgcattttgaatgagaactcatgtcaccactccctgtgcagtgcacagtgtaaccagacacatagggaaggacagttagaatggactaggtgagccaggctgcaaatgatgtaccaaaataagtattaatcaggctgatggaagagacatggaaaattaagaattaagtatttctaagactgaataagataatagaaaaaagaacaaaatcacgttttgactaagtataaagaatggagtgaagaaggaggtacagcagactactggtgggcgaggcaagtgtttggaggagagtgactttaccatgttaaagcgaggactagacgtgtgcctcgtccttcttaataaacctttgtacgtgtactagtggtttgtaagaatagcatgcaatcagaaatgcaactgttaaggagtctgtgactgtgtgtgagcgtgcctgcacccctatccctgtctgcgtctccatccgtcgacccacgtataatgtgtacttcagattggagaacaaaagtaatcattattactttgacctccttcattttcatactaaaaaaatttaagagaaaaggtttataaagttgactacttccaaagcaatatgtggagaattaaatataaaacaaaacctgtcgagtatggtggctcatcctgtaattccagtgcatggggagctgagacagaactactgggcaccaaggcaaggcaggtctcaaaaaggaaagggaaagacagacctgctggctcacaccttgtaatcccattac

SEQ ID NO: 35228 - DNA, 1228 bp, Mus musculus
ggagtcccgcggcgagaccccctgttcattcaacgatgaagatgaggaagatgaagaggaggatccctcctccccagaataaagacaggagagaactcatgttttaatatttgatgctcatatgtgtctttagtgtgagctcttgtgttttgaaatgattgcttcagtctttgcctttgtttgcatttgtgtttagtgaaaactagagaaacacaataagcaaatcacttgaaggctgagatgattgaactgaaagttcccatagcgtggatgaaaccgagcagcagagcagcaggacatggccaacaaagcgtgctttctgaggacgtggagagtggcagtgacgaaggtcatttgttttcagggaggtagggtttaaagacccccagtgggagcatttagatggcaggcggctgcaaggagtctgcagtggtaacagcttctctctagcctggctggctttggtaggcaaaagtgaacttggaagtcacagtgggatcagaggggtgtaggttgcgatccttgtcgcctgaggagccggtggactgctgagctagtccaggggtagccggtcccctcatgcatctgctgccttagcttctagaacggagcaagcttttacgtacctaggtgacatgtagaaaaatttacagtaaactgaaatgaccatttgtcaatgcattggtgcataggagttactagggctacttctggaagccaaaatagaatagcatctccatgtgcattaaaaacttcgccagcactgccttttgccagcattctaaatttggagttttactgagaaggaaactgtttttatagttttaatcagagctatgcatttcatacagctttttaatttacaatgaaacaaagaaacaaattcctttgaccaaattgcttgtctatagttgtctgcagtactgtatgattttacccatgtgcaatttgtaaaatgaaccagatgtcactacttttgtctttatttcaagaatatggccatcactgttctcttatacatgttcttttccatattttaattatcaaaatgaccatatcagacttattcctgggtaaattgcatttcaaactaactcaatattcagtgtttttgttaaaaccttgaacactccagttgactgcatctgtgctagtgtggtatatcatacatgatcttaaagccaaagatgccatgaaaatactgcagtatggctgtgatttctgcttc

SEQ ID NO: 35229 - DNA, 3280 bp, Mus musculus
caaagggttttgtgttggcatgagttctggaacacatctcaggctgtcagagcaaagtgatccagaatgcaacaggagctacctcctgtaaccactacaatgtctgtccttgggaaggtagcaagacctgaagattggagatgtcagggtccataagatgcttttttagtcttcagaataccgagctactggtcctaagatgtttcagacttaaagcaaatgcatgtgttacacccatcccgtttaccatattaccaaatcctcacaagaggtttcaaggaactgtttcgcttgatctgcaccctgctgctgtgttctgtgctttacactgacagaacctgggttttcagttggcaatcatggaaagcatgttgtgtggctctgatcctagtatttgggaaacagagacagaaaggttagatcttaaaagtcaatctcggctacatagtgtgagtcaaggccagcttgggctacatgacaccctgtccaggggaggaggtgggcaagctaaccgaaagactccatctttgtgtgccccacccctggacatatactgctaaggacatctcaatactagactcagtcaggagtggtggtgacacttgtaatcctagacaggcaaaagggtcaccagaggcttgaggccagccagggctccataaggagatcagccgcccccacccacacacacaccaagaaaaggcggggtgagggagggatctaagtagaaaaagatgagttctgatcttctttatctcttctaaactgtgtttatattgctctgggtccaacaacactaaatcatagtttaacacaggaatcaaaatggaagccacggggagcatagcatgtgggtttctttgtaggagggcacttaggtcccttgcacacagccattccctagcgcaaaggtgctggtcacactgcttactgaggcgctgaagaggctccccccacccccttgagggtcagtttgttatttctcaagtatacagcaccgaggtcagtcagttgtcactccctgatgacgtgtagctgcccgctcactccatgtgaagaagagctccagcaggctacacagagatgctcagccctcagcgcttgcaggcttcccgtcacgtgtccctgctggaaggctattcagtgtttgtatttattgtgccttacataggaaggaagggactcaactgaatccctcctccctctaaacagtcccccagaaaacaggctggtggccatgtgctttgcatctttcttatttgattcttttaaagaagtgtagggaggaaaacctgtcatttttgttgttttgccagaatgaatgacgataactcctcctgttaacaaaactatacttaaagcagtagcagtactctgccaattttagaaggtaattcccagatctgttctcagcaagaaagtaccctgttggatagtccagatgaagaagtggctcactatatatccctgcatagattcctaattatgccgtttctaaatcttaaccgatttcttgaacagtgtttaagtacagtgtgatttgtgccccgagacagtcagaacagagtgtgtgtgctcgtccgactgacagacagacaggcaggcaggcagacagacaggcaggcagaataagcagatgacagaaatggtttcagcagtttgtgctgtaaccatgcctagagcaagaaacctgctcagttttataagctcccttcccaaccaaaatggcttatcgtcattcaaaaaacctgtgacataggcaggccttggaattttgctcctttagtggtaagcatggggcatggtttgctttggggggaggatgttaaaatccagaacttagctagttagtacctgcaaggcaggtgagggctctagcaagcccatgaagttctcagtgagcctcattccctagagctgaacctccactgcaggccccaaatctgagatcacatgatctttacactgctaattcataaagatgcataatacagaaagcctgtgaacacatggaagatgatcctcatggtatgtatggtctgtgtctttggtgaaatgcagactagatacctaagaaccagcttcccagtggggctccctactttgtgtgcaccttgggcagtgcctctgggcactaatgttcattagtccaagtttttgaagatctgcacacagtaagtgatcctcagaaatgtcccttccagctcacaaactcagttggcccgtgctccgttcacctgcgaagggcagcctaatatgaagattgatccttcaatttttttcctgttcattttagtgctaaaaggcttttataaattataataagcctcaggaagaagcaagcctcttacatattaggaaaatacctgaaaagttagttcatttgtcagatccagttttcctacatacatctttgttcacagtatgctaaggggaaaaaaaaatttaggatagaaaacttgagcattgtatatgtttcctggatgtccttgacgggtacaaacactgatgtggtggtagccatcccacatggtgtccagaggaaagctacgcgcatttatactgtctgttctgtacagttctctcagataatgacaatagcttgggattttttttttttttaatgtagaaaaaccctgtagaaccagtgctttggccactttcatgctagcagagtggaccttggtcctccctgcttagaaagctactttagaagccattgtagccacagtggaaagtcaaggtttgtgtcttttctactgaggtctcagaaagagagagaacatctctccggaccccctgactcagagcctcgtggcccggcatcccttagcctctatagcagtgtgctcaaaagccctggctcaacaaagcacatcttcaccacgctccatccggacaactccagtcttgccaacaagtgccaaatatctgaggaacccaggaacccaggggatcccttcccccaagcccgtcagtagcgtcagcttggggcctctcgggactcctgttgtaggtggtcccagtcacaagaaaccctctccaggcaagaggccattcagtctgtacattgtcgggaccggagaggtgggactgccatctgggcctcggtggcttgtttccaaccaaattatctgggcttcagaagccatccctttgctatgcttgacaccaaactcagtcactccacctcagtcatgacctgatataaaagccgtgctagtttcccgagttcagactctcagctttggtttggttttggttttggttttttgttctt

SEQ ID NO: 35230 - DNA, 1850 bp, Mus musculus
gatacccctcaaagccgtgctaagggaggagccatagcaagaaggaaggtgaagactataaaataataagctaagttcaaagacttaatcttacacagtagatcaggtgcttcggggcatgtttattaaccctgaccttggaaggaagctaaagccagaggtttgagaaatgtgagatcagcctgggctacaaattaagactgcttcaaaaaaaggaaagttgaaactgacttcctgagtgcaggcaaagttaccaaagaattggaactaatgtttgttcgtccatttgctaggttggatatcgacagcccctagttgccgtacaggtcaaatttgactctggtcttaacaagaaagaagtaacagttgagtgccatattgctggaaccaggaacctaaaaaacaagaatgagcgtgacaagttcttgggacgtgtttcgttcaaagtcacagcacgagcctaggaataggatgtctccacagaattcatgttgtgttgtcgccattttgtatcagctggacctgccattctaggattatgaggccaccttggaggaggaagtggtgtggtacacacttgggtgacatcataacatgcttccagatcatagtgttcagtgtcctctgaagtaactgcctgctgcctctgctgcccttgaacccatgtacggtcgccagacagggaccagtgagctcccgaccccaaacatgcagagtgggggccctgtcttctttgtgtgtaattgccaaacgtctaaagcttcatgtgctgggctgtgtacatattttatggatttaacactggtaactgcatattttgatgccaacaaagttttagggatacaatggtaccttgccaacatcgagtgactttagctggaagaaatgtctgagaagctctgtatgtgaggagggaaaaggaaaataaagtggatctgaaagtagactctgcttctgcgcatgtgtgagtggtgcctgtccgtatgctccagactgtttcttacaaggtgaactagaccatatctgattttgctgagaggacaaactttctgttgtagtacatatttaaaaatactattgggctgactttgagtgttggaatcaagtcttccacattcgggtatcttagacacagggatgaaacagcatttaaattaggtgaatgtgcaccgatttttgttgttgttgttgttttgttttttgaatgaatgaaattcccaagatataaattgtatagtttttcaaactgtcttgttaagtgcttttatttagtagactgtggaccctaataaaaacaaattgtgaaatacaaaaacttcaaactgatttaaaacttggaacacatgatggagtcttctttcacatcctgactggagccctggactgtccttgtcgtctcgggtggattcttgctggaactgtagtaactggagccctttctgttctgaggagagggcctccatttgacccatgggtttcattcacacgtatgtatgtatgtatgtatgtatgtatgtatgtatgtatgtatgtatgtttgaatgaaagctttttgtttgttggtttggtttggtttggtttggttggttagcatgcatgtatgtgagctgcctgagctcccggtgagtgtggaggccagagaagtgttgaatccccctgtgactcagggcagttgtgagcggtcatgtaagtacttgctcttaagcctacatccttggatggagagctcaaccactgagctgtctccagcttctcatttatggttttatctctcatttattatcttttttttttatgtttacttatgtatatgagtacactgtagctgtcttcagacacaccagaagagg

SEQ ID NO: 35231 - DNA, 1176 bp, Mus musculus
gcaaattctttttttattataattaagacttggttatatattttatttatggtcatatttttttatttatttttttatttttggtttttcgagacagggtttctctgtatagccctgcctggccttgaactcagaaatctgcctgcctctgcctcccaagtgctgggatcaaagacgtgcgccaccactgtccagccataataaatgtttttgctaagcaaaaagaaatactatctcctattaagaaaactgccgaaccaggactggtgccacatacctgtaccccagcagaggcagaagcatcactgccagttgaacactagcctggtctgtcatagcaaattcagccagtcagctgtgcagtgaaaccctgtctcaaacacacaagaaaaggaggaagtaggaggatagagggagggaaagaagaaacatttcaagacctgatcatggtggcttgcatctgtaatcccagctccctgcaagcaagactcaggcagggtgattaccatggcctctgtagtgagttctagggagcctgggctatatgtgtagcaaggctctgtctcagcaaagaactctgctcagagagatgcctctctccagccactctgcaaatctgattgtgaaatgaagtgctacaccgcttgctggcatggtggcttttggtttgattacctggtttggggttttggtctcactgtgtggccctgacttggaacttgctctgtagacaaggctggcctttcagtgatctggaaccatagggtgtgcacacaccacgctgggtagcttagcatgactcctcacttgtagaaaagcagctccctgggtatacagctgctaatggtcctgcccaccatctgtttctaatagccaacgctaagttgtaaaacactatcttggtaaatgaaaaccaggaaggatgcttttcaataaaagcacagaagatccctaaggatgcctgccccatgactgaggggtctgggattctagcaggttcaggtccctttaatctcctaatttaagacagtggagctatttaggatctaggattgtggcttcacccccaaaacacagtggcacattaaatatttttgtaaatagaaaaaaacatgttttgatcacttacccaacttttctcagaattacgagtcatgactattttcttagttttta

SEQ ID NO: 35232 - DNA, 1163 bp, Mus musculus
acagtctctctggctaggtcatgagcttctggtcagtagtgacggtgtcttacacagctgtttgctcctgtgtattcccataggacttcctaaaacatagcagattctaaatcaatcttcagtagttgacaaggtatattttaaaaaactgattcttactatttttaacttaatttcatagctttagaaattaatttattttatgttttcaaaaaatataagtgccttctttaaggaaatactgtggtcattgcagtatataaacatttattaagcaggtataaagttcctaaatttctacctgtcatatttcatataaatattagaatgttttctctcagaactttgctatatatgcgcatgcatgcacatacattggtgattattagccatttaacaaataaatctatgcagagatatgtaatagtggttagtgaataattatgtgtgccatttggatagaagtacattgtaatattttgttagcaaaataaaatagactgagtttgatattttctttttgtcctagggaaaggttcaccttgagttaagactgaatgagctgataacagagaatggaaccgtgtgccagcagcttgttgtacagtaagtatatcctttttattcatttatttgtttttgtcaaaaccacctagaaataattctgttttatactcttagactaatttcttattttaaatattttagaaacttcaaaataaagctctcatgcatcatttctttaccaaactgagaatccagcttattttttcatttaatccacttaagctatggcaagtcattaattactcaacaaagttttaatgaatgtgggttgagcaacaaatgtatgtaagcattaaggcatgaagggtcataggaaggagcctctggcttcctagctgcggagactcagaaagtgtttccaggggattcttctccgagcactcagtcactacgcagagcttcagggagccagggatcagggtgaggaggtcatacgacgtgatgctcaaactacgtgaccacctaagattgctagcacctttccctctaggaagctctcagtagtcagtccaactctgttgtgaggtcatgttctagcctagtcttctacttcttgcctctgtaaacgcttgctaccaagcgtttctcattctgga

SEQ ID NO: 35233 - DNA, 1197 bp, Mus musculus
tactagaggagatggggaactgcaagcaaactgagctttgttttgtccgttgtatatatgtacacccacatcatttgagttttgttgagagagtcacaaagggcttatgaaaatcacttttgaattaataactagatgacaagcaatcctgtgatccactaatttgttttatctcagttataattataaaaaattataggtttaagttgttttgatttaactacaaaaataattatatgtatggatgtctcctggcccttatatgtggatattttttaagtggacttgtatgctgataattctagaccaaagtaaatatggcagaatatttatacatacaaataattttgcaaatattttctataattgtattattcgtttaaaatgttgatagcttgtgttagtttcagggaggggtgtatattttgataaaatacttgactttgtatttctgtacattctatacaatttatagaagagccattttaagacaactggtgacgtttttgttgttgttgattgtataaatgttatgactggtgtttaagtttgcatcgagtacgtaaagaccaagtagaactgaagtgtaaacagtggacatactgtatgccatacgagatatactgtaactcactgtcttcgcatctgtattttggttaggaaatatgattaaatgcagatgttaagggttggaaaggtctaattttatttttagagataatgaatataaatttgttttgcttgattaaaatagcttattcctacattaagtgtcttttctaagtgacttactgttaattcttctgtgtagctatttcatctttatgagtcatggctttgttacatacaacactcattcaccataactgtttccttgcgtgtatttcatggaacctacatgcttaggactcataaactgtgatattaaaatagggaccagacatagtggcagattcatttaatcccagcactcaggaggtagaggcaggcagaactgagtttaaagccagctggtctacataatgaattctaggccagccagagctaccaaacaaaccaatccgagggggaagggggaaaacctgaataagagacatcaaatacttccggtaagtgttggggataagcctgatgttatggtacctcaaagtgaaatcctcacttggaagtattacagaaaacaaatatttactgaat

SEQ ID NO: 35234 - DNA, 1170 bp, Mus musculus
cagcgaacaaaaggatgacataaaagcctttgctgaaaacgtcctttgagtgacaacaacagttagaaatcttcaaaattgtttgtgatttttctttctttctttctttttttttttttttttttttttttttttttttttttttttagttttttaagcttagttttgttcacataatagtcacaaaggatagggggggcagtgttaattttcatttgtgtaaactccaaaaaaaaaggatcctaacaactattttgggttttatcatttacttcacacagaatgagtaaaaaacaaaatagctgaatcctctaacgaccctagtatcttgtgaaggctaatgaagttcttagctgtgggattttgaacagtgaaaacagcaacggaattttagcctaatttaaccctttctcacgagcactaatgaggtctgctgaactgttgttagtcactggagagagcaagggtcaggatcatgaagacagcgtctttgagacgtgctaacgagctatgacaggatttattgccattgagtttctgcactgttaatctttggtaaattaatgggtatttacaaaatacttaacaatataactgaaaatatgtaatggataacctaaagtaggacattcacatatcatctagaaatacttttctgcaacataaaccttgtaaaatacatatatgaatcactataacttttagctgtctatatgtcccttgtagagaatcctaacgagcaatagacctcagagaatgaggactgctgtagaaatcagtagagcacttggaatctgactggcgagcatgtgtatgctgctcaatggaatgctgtgctgttcccttgaagtacagctgagctgttattagaactggtccactcaagtcacacagaacataggtcatgccttatctatggggaaagccttcccagacttacctaagcttacctaggccatataatcctctgcagtggcctcacctcagagaatgaagaatggtcaaattcttcagaactctctgcagtcttccaaggccatggatgttgggggctaccctacccagacttaaggggtcagataatcctgatatctcccattccgctgaatcagcacgcaggaggttgagagcaagacacacctctgtggtaatcaagtctcaggcacttgg

SEQ ID NO: 35235 - DNA, 1167 bp, Mus musculus
tgctattttctttatcagaatccgtcttcacttggcagtagcttaataggtttgttgggttttttaaaattattattattatcttttttacgtttcttgctgctgctagcaattctgtgaaattaacagtctataaaatgcatccccgagcagatacctactgtattgcaagctttctccaagaagaggatatgacagtattcattccagctgatttccttccttagcacaaggactgtttgatttgcagaagcagacgattcattcactgtgcagccgcgctgctgcttaagtgcatggaatgccttcaactgcctggttgcagaatttggagtttgctaagcagtggttagtgattgggctcatcttgcatcaccacttgatggcatttttctttgttccctcctcctacccagttgaaccaagactctgaggctgaaatgcaatgtcacttacaacattaatcagatcccgcatttaaggtgagctatcccttgccgccgcctccttccctcacgcttgtgtgctgcatgcagtttgcgtcttgcttgtgtgagcctaagatggcaggcaggattagccgtgctgtgccgtgtgtgcatgctgtgtgtagaattcattacacgttgcctagtgtttcagatgtgagtatgtaaatgctctttatgccacatcatctggtagggaagacttgttttgcctcattacaaccttcgttattgcgacacgatctttctttcaggattcatttgcttctgggggtttgctttgcatcccattcaaaataagattatgccctttttttttaaacaaagccaaataaatcccacaaaaccctaaaacccaaacgagagcaacagaaccctgttaccagatggtgtctccccgtccttcttgcatttgctgtcttttaaataatgtatgttgtattgttaattaatgtgaatatcaaattaaacacccgaaacttacatgtttattacgcaggtaggaggaaaggtggactatttttaactcccagccactgcatccggtgcaagcaactccggctctcacgtttgtgtttgcagagcccgtgtcagtggtttgattttcagcaaatgtgacagtggcctttgcagtggtcagctctgagctttgaactctcagaggagcaaaggagaaaaa

SEQ ID NO: 35236 - DNA, 1167 bp, Mus musculus; identical to SEQ ID NO: 35235

SEQ ID NO: 35237 - DNA, 1572 bp, Mus musculus
ggtactggagtgattctatatctgcaaatcaataaatgtaacaactcatataaattggcttaaagacagaaactgcatggttgttggaatagaggcagaaaagagcctttgacaaaatccaatatctcttcatgataaaagccccagggagacagagatgggcaacatactccaacataataatgactacagatgacaaacccatgactaatatcctaaatgaagaaaaacttggcttcttcttctttgggaaaacaccaaatggcggatgacgccggtgcagcgggagggcctggaggacccggggggcccaggattaggaggccacggctgcttccggctaccgcggaggattcggcagcggtcttaggggccgcggccgtggtcgtggccgcgggactcgcggaggtaaagctgaagacaagaagtggatccccgtcaccaagctgggccgcctggttaaggacatgaagatcaagtccttggaggagatctacctgttctccctgcccattaaggagtctgagatcattgatttcttcctgggtgcgtccctaaaggatgaggttctgaaaatcatgccagtgcagaagcagactcgggctggccagcggaccaggttcaaggctttcgttgctattggggactacaatggtcacgttggtcttggtgttaagtgctccaaagaggttgccactgtcatccaaggggccatcatcttggccaagctttccaatgtccctgtgcggagaggctactaggggaacaagattggcaagtcccacactgttctatgtaaggtgacaggccgctgtggctctgtgctggtgcgtctcatccctgcccccagaggcactggcattgtctctgctcctgtgcctaagaagctcctgatgatggccggtatagatgactgctacacttcagccagaggctgcactgccaccctgggcaactttgctaaggccacctttgatgccatctccaagacttacagctacctgaccccccgacctctggaaagagactgtcttcaccaagtctccttatcaggaattcactgatcatcttgtgaaaacccacaccagagtctctgttcagaggacccaggctccagctgtggctactacataaggattttgtacaagaaaaataaaagaattaagtctgctttaaaaaaaaaaagaaagaaagaaaaaagaaaaagaaagaaagaagaacaaagcaattctattaaaattaggaacaagacaaggctacccactctctgcattcctaagcggtcagaagagaataagacaagagagggaaataaaagggacacagataagaaatggggtctaagtaacccactcttcagattgtatgattctgtacataatagaccctgaaaattccaccagaaaactcctagacctgacaaccactttcatcaaagtagcaagatacaaaaccaacacacacataaaaaatcagtaatttttctatttaccagtgaaaaccacacaaagagagatcaaggaaacaattccattgacaatagcttaaagataataaaataggagaaagcct

SEQ ID NO: 35238 - DNA, 1116 bp, Mus musculus
taatccctgctcgttattgagaggtcttttttattttgtgaccatgattgtcagtaaacagagcattggtgagaagtcactgacttacggggttcagtgctttcttccgtttgtctcacgtcactgtgacaggtgcttttctagtcacagtgccttctggtgccctctttctccacacctcctgagtactgcagcttacttagctctgagacacacacacacacacacacacacacacacacacacacacacacaaacacacacactcacacacaccctctccaaacactggaagaggccagagaggaaactgacaggaacccttaatgttgatggacaccagaggatgggttgaccctgggcactgaggctgtccagtattgaaggatatcagggcagccatcagaggaaggtgacaactatgccaagtttaagataaaccaagtcaagagaatgtcatggccgtgacagtgacatgggcccagaggctaatttatgtaaagggttgcatgaggttctgtagtccatgtgccaaagctggggtgggccagtcactggttgggcactgttgggcttcagcacctgaggtggcaggagccagtgcatgtggcagatgagggctcagctccagtggcactcaggaccttgctgtgaagtggtggggctgtgagttcaggtcagagttggctacttgcagttctgaactcggctcagagcgtttgtgttggaagctgaggagcatacgggcttcgtcacttgtgccgtcacctctcatgccctagccctctgtcaccaatgcttggctggtcctgtgcccaggtattactcaggctgtaaaaatagagtttggcagagaatgccatcgagaagttggtgaggagagctggggctgtcaccacctttcaagacacttaaccagtgagagtttgatgcagggctttcttgtgtgttggagggatgaggttttaaagctggcttacactttccctgtagctttggattcctatcagtactctgtgccacggactcagattggcacctaccccgacctcaggctcatacccacacactaactctaaaacccaccaagtgggctcatcttgggaagtcagcgct

SEQ ID NO: 35239 - DNA, 3567 bp, Mus musculus
aggaagaccaaaagatcacagtggaccatggaatcttgaagccagccagcatggtggacagaagacagtagttgggaaacatgtaactactatggctgagtggaagtttggttttaggaagtaaggtaccatacgacattaatctttcagtgagtaaaccctgggccgcctcgtcaagaatgctttgaaaagcattcctttctcaaaattgccattttctctattgttcaccagctccagtttgttttactggtttatgacattcagaatacagtgttgattccatgagcatttttggttgtttaaacaaaatcattcctaagtgtatactgtactgtaattttccaaagatggtagtgacaattacaaatgactaacttgaacgtctgcaatactgtaaaataacaagtcgatcctcagtaacacttccccaggagggcctgcctgttacagtgttttatgttatctgacacccataatcactgtattttgacagccagtgaagtagtatctaaatacttcacattttcaacatcaaaatgttatggtcacatctaaaagatctccatcataattgaacatatcaaacaaacacacacagctaatggtttgggactataaaataagctagtggatactgactcagtgacttagcatcctcataccttttccaattatgtgatgcaggtatggatataattttgattcataatgtgattatcacagtctcatacctacatattatttactttaaaagtagaaaactaacaacttgaattttttctacttactttcacattaagaattttaacctttgaattatttccacatctgtataagttattctttgttggtagaggaaatggtaattttcagttttgccctttataggctccttgaagtgatattaatatttaggacaatataaatattacaaaaagacacgctcagctatcagatacaataaatcttagttggcagagagcctgtaagcgagtgtgctacattgcacaaatgttattcctagttccctaaatgctctctcatagagtcaggctagttttagttcattgtgttaacaagataatagtttttaaattttgctgttgagtcaacaacatgtttgaatactttaatatatatggccattataaaggtatttgctgcaatactatagattttcctatggatgttgctatactggcatatgaaacgtctacaattaaactctagtgtggtgctcatcagaggaccttcactttacactttgtgcaatggctttctcttcagaatgactttgtgaatgcactttgtggccttttgagggggtaagggtcaggagagaattcatgttaatttctttaacattgttatgtattaggcagaagcagtgttcataatatttttctggattttaggtatgttttggagatcttacagtattttaagtatgctgtgtaatgccacattattatggaaaaaaatagccgcatgccattgaaagctttctctgctgtcaccaatgaagtttaatccctcttaaatttctcaccttgacttccttgtaatcagtaactggatgtttttgaggtgctcaattggaattaaaaatattccaatctatttggagaccaaaggcacgtttagatccgttacctttggaattattgtagctttgacatctatgacatggaacataccaaaaaataaatccccacgcaggggtttaacttaaatgtgtagagaaggtctcaggctatagtgtttgcctcttcaggtgccactgatactgcctaatacagcgccatttgctctgtgaagatcaataacaattatgttgaatgtcagacatgttctcctgtgttacacagatctcagatgatgaagaatgacatgaaaaccagcagccaaggaacagcttgtgttgtcgtagcaagtccacaataagtgtccttcagggataacatgtagcagtcggtattttacaagtaaaactcacattagcctctagtgcttttaaagttagcgtgtgatctgcaagaaacggggttttagagtctcagtggttacttgtaaagcaaccgctggaaaggagcaaggagatctgtttttttttttttttccctgagcattgtgtaccacagtttacttcatgacagagataatccaaaaaaacggaaatcatatatatgttttatatagtttgtctatgaagtatttctttgaagattctaattgtaatgtttttttttaagtgcatactcagagcattggatttttttaaaacttgttttcaattagataatcttttttttaatgtcttaaagagctagggtggatcttgttgtatacttttgttgcagtcttctcaaaaaagtgaactcactcagccgggctagagcagtagctactagaagcaaccctcacacagcagcagctcctgtggctcaaatgcttgaaatttggataatccagatggtgagttgccaagctgtcatgggataccatacagtgctttaagttgcctgggttggcttttacttcaacttttgtttgttttatttttggactcttgttgcctgagatgaccctgactcctgcttcccctgcctttgcctataagtaccagcgttacaggcttgcccctccacgctcacggaccttgttccagttctcattgtacaactgtgtggaaccatcccgactcagaggggctcgagctagcttgtaattctgataccatgacagcgttgttaggtcacacagcctggtcctttgtccacttttggtagccttattaggatgagcacaacatggggtgtccagaagagtgaatgtcaccgaagtctaaacatggggggctttaaaaatccatgaaatcattatttcagtttgaagaacttaagtggtagatatcagtgtcccccttcctccaaggcccttccttcgtatttctcagttcacatgctcttctgtccaatctgcccgtctgatagggacccctgcggctgatgcacagctcgctctccttctttactgtgacttccaacattcctaaggagatccacacatctgggtaaagaagacagacctttactataatataaaatgaagagtgctttctgcccctcacatcccctataactttgtttctccctaattgcacctgggtttttatgctgtccactttagaaaataaaggactagttctgatcagctatgctaacctttctgaatgtaccccagtggatgtgaattaaattataccaatcactcacagtgtagtcagctttaaaagagctgatgagctttgcccattcatgtgagtgttgctattgttgcggtttttgtacatggctgcaaattatgtgcatttatgttctgtttatgttaactagctgacttgtacttgaattaaaattcaaaaaattaaaatgtgcttttaaaaatgtgtatcttaagattttataatggtgatatcattgtaccagcattaggctgtgtgtagaacagactgcattgttctgagttacgcaaaaaaactttctgcctgttaaacctgataat

SEQ ID NO: 35240 - DNA, 1172 bp, Mus musculus
acacttctttgtgtgagatgtggctacttttacagtgttaaagcagggcttaaaagaagtaaagtttgagtaagttaattatctgatactgcagaaagggaaagaacagttgagttagatcattccacttaatgtagcagctttaaaagccaaagaaagtttatgactggctctaataacttttatagtaggattaaatacatcacagcatttttctcatattaaatgtgttgggtatagtatgtctttctaaaagcaacccgcttgacatgatagtatttgatagaaggtattaaaataactaggttccttatttctctatctgagtttatgtaatggatgtaaaggccagttgaataaatgtagttctgtgaagtttatgttactgatcttatttgggaaagcaaactaaatactcttctatagatgaaacatctttataaattcttgttcataagatagcattttctatgctgttttgctaaaaattaaagataatacttggtcccagaagcacactgctccagcgatcctaatttgctctaaagctgagccaccccgccatggccactgctgctctgcagtggtgtcactaggtgactgtagtgacagagggctgccttctaccctactcactttcttcattgtctgtagaagggaggagagaattccggtctgtaactttttggacaaactttttaagagtttatacttgtttaattgggtaataagtgacccctcctgttaatcctagcagaaatcttacctctgtgttaatattatttaaaaaaaaaatgatgggccaaacttctggtccacagaccaaaatattagtatataatgccatttatgttggattctctttgaatgtagtgtggcaggtaatagattcacccccaggcaactgttttagaatgcatgtttgtgaacttggattataggggagaacaccatgttttcatgtagattaggagaacacttgaagtgaggtcagtctgctcctgacagaatcatctagaaaggccagaattgtgaacaggtgttcatggtcactagaacataaaatgaaaagtgtgaagcctgtatcagttaatagtttcaacattgctagacattttctttaatatagattcatataatgtaaagatccttaatgtgaataatgtatttcc

SEQ ID NO: 35241 - DNA, 1218 bp, Mus musculus
agaaaagacattgaaatctacagattgctaatttgtcctctgaagacacataccaagtttttattttcatacagtgaactcattgttcttaagccacatactaatgaatgctggctactgtccttttttaaaaaagaaatattttatgaatatgagtacactgttgctgtcttccaacacatcagaagagggcatcagatcccattacagatggttgtgagccaccatatggtggcctgagccatttctctagccctcactatccattctaaaaatactaactaaatgaactaaaattttcttttggtattttgacatgtatttaatttttgtgtaattataccctctttattagaagttgatgctttatttttcatatttcctatatgtatattccataccgatttctctttaagatatcttttgtaatttcttcttgggaatgagtttattccccgtcatgttttggaattatatatcctaagttttattattattattttcttcataaatttaatgcttttgttataaattgttaaataatctccttgtatttttgaagcaggctttcacttagtagattaggttgcccttgaactcatgatactcatgccttagccactgccttagttagggtttccattgctgtgaagcgacaccaggagcaaggcaactcttacaaaggacaacactgggacttgtttacagcttcagaagttcagtccatgatggtcatggcagaaagcatggcagtgtcctggcagacatgatgctggagaaggaactgagagttttacctcttcagccaaaggcatccagaaagaggctctcttcattgggcagagcctgagcatcaaatctcatagtgacacacttccttgaacaaggcaacaccaatcccaacagggacacacctaatagtgtcactccctgtgcgctaagccttcaaacacaggagtctgtggaggccaaacccattcaaaccaccacacctgctgttttctgggattgcagatttaagcaatttggcctcttttttcttaaacacagtttttaaaaaatataataatggaagctagagagatgatggtttaatggttaagagcatttgatgctcttgcagaggacctgaattcaattcccagtgccctcgtggagtttcctaatcctctgtaactccagagcatttagtgctctcttctggtgtccatggctctg

SEQ ID NO: 35242 - DNA, 1191 bp, Mus musculus
gcagtggctatggtgggaatggcagctatgacagctataacaacaaaggaggcagaggcggctttggtggtggtagtagaagcaattttggaggtggtgggagctacagtggttttggcaattagtcttcaaattttggatggataaaaggaggaaactggaggcaggagctctggcccttctggtggcagaggctagtactttgctaaaccatgaaaccaaggtggctaaggaggttccagcagtagcagtagctatggcggcagcggcagggggttctaattacagtcaggagacaaagcttagcaggaaaggagaggcagagaagtgacagggaagctacaggttacagcagacttgtgacctcagccaagcacagtggttgcagggcctagctgctacaaagaagacatgttttagacaatactcatgtgtgtgggcaaaaactccaggactgtgtttgtggctaattgtataacatgttattttagtttctattctgtggaaagtgtatagcattccaacaaaaggttttattgtagacctttttcacccacgctgttaattgctaaatgtaatagtctgatcatggcgctgaataaatgtgtctttttttttttttttaatgtgctgtgtaaatttagtctactctgaagccatcttggtaaacttcccctacagtgtgaagttagaattccttcagggtgataccaagttccatttggaatatatttctgtttgcttggatgaagaagccgttgtcttcacaaaccttggtgttgttaaggtaccagttactattgtaactagtaatgagtttcaccgttgaaagggtcatccaagcaaggtcacagttttgttacaatggctgttagcacaccctatgcaatatcaaaattgaataatggtatcagataaaataacagatgggaatgaagcttgtatatcatctgttatcatgagtattcaataaacgatttaattctcttggaaaaaaaagtacactttttttaaacaaatggtgcctgtaaatgtggatatccccagacaaaaacaagtcaaagccttgaaacctaaaactcatacattatatgaaagttaatttaaaatattattttgatattaaatacaaatcatagaacccaaagatctttttaaagcattcctagatttaagagcacagattgtact

SEQ ID NO: 35243 - DNA, 1182 bp, Mus musculus
gcatgtttaaaaccaatcctttttgaatgagattttgattgcaaatatttaagtctagagtttgagagcactttgctctgctctgacttttcagtgctgagtggtagatggctgttcccatgtccccctgggctacctcttgtggctgcattcctcattcgtggttgggcaagttgtttgggctattagaatgcctttatgggttttttttggggggggtgggggtagaagagaggcaaatgaaagctaggaagctttgggggtatggcagccaagatgtatcaatcagttcaggagccatttggcaacataaatttgcagggaaatagtggtgacacaaactaaagccttcccctcctttctcacggcacaaagtcactctgcatgccaactccaaagccaaagcatctaagtgatattcctgggacaacaggcttttattctgttcccaacactcacttaaccttggttaagatcaaggaaggagtggttataaaatagtgaccttcagcaggtatccaggtgagtggtaggtcaaggcataggcctcccaacaactactctgaccaggaatgcaaggcactaatcacactggcttttcccagtgtccagagtatggtatcttgaaaccaaagttcccagatgacctggacaccatgggacccctaggaagaggtgagcaaccaaggaaaggcagattccgccccgaagagaatgaactgacaggtgtggccatagattcgtccattgcgtttcttgccaaatggacaacctgggtctgctcttcagagcttgaagataggtgggctgcgagtctcaggtaactcagaaggttgggaggaggagaagcaggaggatgccagtgagtttccccagtggagaaaagccattaaacccactgaagaagtgtctcaaggaatcctgagtgtattcaagtagatttaagcaaattctgtaagtctgactaaggccccaagtcacacaggtacaaaggactatgattgctgtggcagaactttctgagaactttattgaattaaccattcattttgaccactcacagtttagaccaaattttctgaccttaacaagagagtttgtctcaagggacacccaccaagtctccatggagataaccactgttagaaaaacagcgcccccttcccgtgtaccagagatcag

SEQ ID NO: 35244 - DNA, 1099 bp, Mus musculus
aataatcctgttcattttagtaactaacagttgaatacagtcttttgttcatttagtgatgagcatggggcacaggtaaacctgctacaaggcagtgcctccttgcggtgtgatgctgtgagcgcggtatacgcatcttggtgctcagcaagcattgccgcatggttggagtcgctgcatctccagccgtgcttgctcctcatatccaggctctgagactgagtgaggagagaaggccgctgcagtaatgtttttgtcagtaaccccacactgattgatagttgcttttggttttgtttcttagaatatttattcatagcatattcaaagaagtaaatagctctaacttaattttaaattataataaccgactaacatagcatctgttagtgaattactttatcataaatatgaattagtttcctgacacccatgtcattgtccctgacttccgtcatttctaggtttgttgtggtatgtggtgatggggagtatatcatctacacagcaatggcattgaggaacaagagcttcgggtctgcccaggagtttgcatgggcccacgattcttcagagtaagatgcaaatagggtgttgatgccaatgtggttgatgcttttccctggtaaaagacagtcccagcacagctgcttcattgaagcacttggagagtgtaaagcgcccttgtcctgtctgaattaccatgctgcctctcaggtggatgtgataaatccattcgactggggattcaagaccgatatccttgatggggcctgtgacatgacgtgatgcttgggtttaaggcaaagtaggccctcccagacatggcctctgagggccggttgcgctttataaactagttgggaggtgctgcttatgccaggtcactttgatgagaattttaatgtatcttttaaaagttcaatttctgcatgtcccctactactcattcttaacctatttcagtctgcattcagaatattcataaaatgttctaatttaaagcacaagtcacattaattctttacatgtttacagttcatagtcaccaacacagtcagattatccctaccccaatcagctcattccccaggcccag

SEQ ID NO: 35245 - DNA, 1198 bp, Mus musculus
tttttaagacaaaaattcttaggaagaatgttcttgaaattggattttactttgcattccttatcactctcatcatatctagcttgttcagatttctggtgttgactaagattgtaatagtctgttttcttttttataggttcttggtgaaattcaggaaattgtgaaaactgggctgtgggtaggtgactgcttcatttacacaagttctgtgaacagattaaactattacgtgggaggagagatagtcaccatcgcccacctggacaggtactgagtgtcattttgcttttgtctaaagcagcctaaatttgaaagtgctttatgaaccaaatgtcatgctgacttgtgtaacagtgatgggttaatttccccccattagttttagtagattttctgatggtaaccaaaatcacatccattaaatgtgtaagaatttgagcaagaagggtgtgtgtgtgtgtgtgtgtgtgtgtgtgtgtgtgtgtgtttgtgtgtttgtgtggtggtgtaactgtagatttgggcttctgagttggtttctctttctcttacaggacaatgtatcttctgggctatattccaaaagacaatagactttatctgggggataaggaattgaatattgttagctactccctgttggtttcagtcctggaataccagactgctgtcatgcggagggattttagcatggcggataaagtcctccctaccatccccaaagaacagaggaccagagttgcacactttttggaaaaacaggtgagaagttttgcctgcctactttccttccctcccctctctttctttttaaaagtagcatttgacagaatgttgatacaggttgtagaatgtcatctcttatgtcttaccactgaccatatcaggttggcagcacacacacagcacatctggcttgaactcttgcttctttaggcgtaggaacctcagtgcctctgtcagtgttggagctgattttatcacttttcttacatcccctttaaggttcttggcatttttatttctagcacacctttaattccagtactggggagtcagaggtagttccagagttccaggccagccagggctacaaagtgtgtctctaaaacaaaaaacaaacaaaaaaacaaaccctaagctggacttagttttcctattattatcttgttttaacttaaacatgtggtaaagc

SEQ ID NO: 35246 - DNA, 1150 bp, Mus musculus
ctacccctagttgcaaggcacttaggccccatgatgttagaattaaagccttgctgacccaaaggactcttcccgaggccctaaaagttcctagaaattcaagtggtaaaatccccaacacctgtttcttctctaacaaagaaattagtaggtgtcttaagttcttggtggcctttagtgttttcccgtgaatttttgaggatttggacacgacttatctacctctctgttgttccgggctactctcctagaaaactacccaacaccatcatgtgctataatggttacctcacttgcatgtacagggttcaaagccatctccaaagctccttggaatagtctcccatttcagttccttcattgtaagtgtgattcatggtgaagtttgccggctgttttcagcatgcgctgggatatgcatttgttttctttgttttttaatctttgtttagtttgtgattagtcaggatctcattagaaatctgtggctttcttagaactatgtaatagaggctggtcttgaactcgcagagatctacctgcctctgcctcccaagtgctgggatcgaagtcttgcgccactctgccaggcttgggtttctttttatagtacattcgcttcaagatttcacctaaactggtggaaaatgtttacattactattattccacgttattgttttgttttaaattctgaaccaatttttgctcttataaacctaatttgtaatgttttgtatgcaatggtcatatttatcttgttttataaaaataaaataaatgtccctggtaaaggtgagtcaaaaatcatagctgttcagcttttagctgttcagttttgtcaacctattttaccaaattccctctttgttctcaggctaacctcaatttttatcttgctactactaatctgcttttaatttctttttgcattaatacagatttaacctaggatctcacacatactgggcaagcgctcaaatacatgtacatccctagctctctccttacttactctttattttgagacagggtctcactaagctgcttgggttagctttaaactcattctgtagcccagacccaccttgaaaatgaagtcctccacaggagccaccctagaagctaaggttattggccagagtgtagct

SEQ ID NO: 35247 - DNA, 1832 bp, Mus musculus
aaagagtgtttaattttgttgtccttcttaatgttctcagtcaaataaatgggtggtttcatctgtttggggacatgtgggtgtcttctttttgggaagcacagtctttgcaacctgctcccactgggactctccgaaatggccacgtcagtggacaaaccagccttaggagtgggcttgggctcagggcctctgcccggcttccccttgctttcttgttccacatggacaacctgggaggcctcttagaccaggaggattcaagcctaagaggaggagatgtttctgacagtttgctgttacaacctcatctcccctgactctgctgcactacatgtgtgcatgtgcacatgcacacgggaaagccagggcagtgtggctcagtagctagacactgacagtgctccatccatacttgctgaattgcttgtctcggtctgagaagatggaaggcagaaagctaactgcattctggagtgaattaacactctaggctgtactaacatctacttgaacaaagactgattagccgccaccttgactttgagcaagctatattttatatcttcttaaatgccaagcttgttttgcagcacattttctctctctggcccccagccaaaggcccagatgccctccaggttggctttgagaccttggtgttagtatttggaggatgtcagactagagttaacacagatccccaggcagcacagatgggggatcgtcagatcacatgtggacggtgatcactctttgttcctgcgtgcatgtgttaactatatctcatcgtaactgactcagattagtcagatatgagcccgagtgctgtgtttctgtgcctctctaaaattagaacttctgcccagaggcaccctaaggataccactcattgtcctgtggttcggtgggtgctcctaaaagaagtgtcaggtcttcagcatgtgttttatacatctgccttgacccccttgggggcgtaaagccacacacttgtgctgcagcctctgccagtgggttacttggcattcttggcaaatgcctctataagattaggttgaaggcaggcctgtagggcatcttcttagtgattggtgattggtgtggaagggcccagaccttaggggtggttccaccgtgggatgatagtcctaggtagtataagagagtaaactgagcaagaaacattcctccatggcctcttcagttcctgcctccgggttcctgccctgtatattcctggcctgtaatgtggaactgtaagccgaaataaactctttcctccccaagttccaaggtatgtgggggtaccaccaactgaagttgatgtaatataatttcattacctacttaataagcaggctggaatagaccgaagcaattttagattttagagtggagaagccatccaatctgggaggataccagttctctaatctccaggtttctctgaagcaatatcttatttacaatatcttcgagcacctacctcaagactggctgatccccacttccccacgtcttccttccgtgttaccttccacttgagtaagaaaacaccacggtcttcagcagtatgacagtgaatgacttcgatctttttctaattcataaaatgtgatgaagtaaagatttaaattccaaaatgctacatgcctgcaccaatagctgactgactgtgcgcctgcaccaatagcaggtcattccccagtccatcatatctcccatctgtttgtgggcttatcttaagtcaacagaattctaccaagttaaatttgagtgtggctctgcccttggtctttgaataaacatgttctccatgtaaatttgtt

SEQ ID NO: 35248 - DNA, 1225 bp, Mus musculus
ggtgtaagactgtccaggaaaatctatggctcttttataatgtggtttaagattgtgtattatgaatttcattttttattattacatttttacttttgtgagtgtagtatgccatgactatatccatgagtgtcctgaaactggtagtggctatcctgcctccactcccaagttttctcagtgttacaggtatgcaccttcaatcccagttttgatggttgtaaggttaataacccaccggtatttctctataatgttttaaatttgtgtgttccagagattcaacagcatgtatattttatatgtgagacccattttatctgtgttagtttgtcatctttcatggtagcttcctgtctagttttatctgcttggtaaaagacaaaacccaagttagtttgtattgaagatattttgtgttcttttctttttttttttttaaaaaacaaaactatttttagctatgaaaaatgtaacattcacaaaatttctttaggtcttcatgagtttgatgccttgaaggatcccgaagtgaatgaatttagaagaaaaatgcgcaaattcagtgaggccaagattcagtctctggtagggttgtcttggatcgactggctaaagcacacgtatccgcctgagcacgagccgtccgtcctggagaacttggaagataaactttatggaggaaagctggttgtggctgtgcactttgaaaatagccaggtattgtttgatataatatttatattctcttgtaatgagcctctgattttatctgactgccactgcattcttagaagtgcttcttgcttagaaagcactactgcaaagaaaactcgcagagtcaatagacttagtctgtaattgtgtaggattgggataggctttgtacagaaattcttgacgtgttacaatagtattttagagttgtcatttttagagttgtcaaaccacacttcttaattgtcttttaaagttgtttacctagcacacacaaggccataggttcaaaccctagcacttctcttcccctccctgcccccacagttggtaaaattggacagaaatcattaattgataggttactcagcagtaaggtatggatcttttcataccaacacatgtctctttttttgtctctgctgggcatcaagcctaggccatggcacaggagtgcacacctgttattccagagtcagaaacaggcacatctctgagttcgggacta

SEQ ID NO: 35249 - DNA, 1099 bp, Mus musculus
tatctcctcattgggaaatggttcatttttctttataatgtcttctccactactgacttgaaagtttcatacttcagttgtctttttttgttgattttgctgatcgtcataaaattctgtatatatactttctcacccagtaggcagaagccacactgtttcttgaaagattaatataagaatttctaactaataaaaggtggttgaccactaaaagggaagtggcgaagaagactctcacaggtccttgctgtaacttgagaaaatgtatactacctccaagagctaaggggcagcaggcaagaaatgagcttagaaacatagctaagcacctgtgctgtgctgaatcggacctcaggtgctggcacaggaatcctcagtccacttagctgagcaacttaagatggtggactgttgctaacacagacggccagggctgtgctggcagagcctgagagtgtaagttactatgaactgcccttaaaccattcggctaaagagactgctcatcagaagaaaagctgtcatctttctcctcgcagtagccctccatcgtcctctgttgtcaaagcccgaatcaatcctacttcagagctgcgatctgcagcttaaggtacaagtaactgaccttcctcgtgttgagagctcatgctctcaggctctgctaccacagccatggccctccaggtcattccatatatccatgcagatgtgtgtttttaagatgcatttctgattgtacacatgggggcaggtgtgtgcatctgtgcgtgcaggcgctcatggagatcatctgtagcagtggctctcaacttcctcacgctgtgaccctttactacagttcctcatgtgctaacccccaaccacaaagttatgtttgttgctacttcatacttataattttgctatgaattgtaatgcaaatatctgtgttctggtagttttaagtgacccctgtgaaactttgaggctcgttggacctcagagggggtcaagacccactggctgagaactgctgctctagagctgataggtggttgcaagccactcatcatgggctctgactgctgagccatctctgcaggcctagttttatatt

SEQ ID NO: 35250 - DNA, 1681 bp, Mus musculus
gtttagagtaactcctgggcagttactgagcacaggagagcactcttgtggaaataaaaagcatccaaagtcaaagccacccagagctaaccctggttgcttgtaagcctacatttgccccaggttctgacgtggagctgcagtgtattttcctaggggcaacagtgtgaagagttacatgctctgggaaagcctaggggacaaacctctggtatgtggcattatttccataggaaattttgagcccagccccaaaccaaggtctatgtctgaactctaggttcaggaggctgcaaaacagttaattcctaggaggaaacggagcctttatattctgttaggcaagggtgagacgaagtcctgctgttcgcccaaagacatgttaagaggaaaatatgtacattatgtatttaaacaagtgccttttacacatttcagtttgtaagaccagatagacttctgttctgtttctagggtaagccacccattcagacaataatccctgctatgttcctgttgtcttcaatgatgcttttcctttttatttattattattctgtgtaggatgtcacgtgtcacagcacacgtgggcatcaaacactttctgtaggttctgggcaggcttgtgcaacagatgacctttgccctctgagccagccatccctgatgctctgtaaagaatgcaacagagcggttatggcggcaaatgtctttagtcccagccctgggaggctgaggcaggtagtctctgtgagttcaggccagacaacactacaatgtatgactgagtctcaacaaaaatggcaatgttctgcctgggcctggtcccagaacttgggaggctgaggctggcctgccttaataacacaatagtgttcactctgacttgtaggttatgtgttatttattatagactgtaatattcatagttccaactcccctatcaagtgtgagatgtggtttctgctactgtattcttgcgcagatgtgtgttcattccgcagcatcctgaggacacagaacagtccagatactgtgccgtcctttccaatggccagtccatactggaatggtctcttcctgtgtagcaccgtccattttaacaattctcagtgtaggcaggtggatctctgagtccgaggccagcctggtctacagaggaacttctgggacaggctacatagagaaaccctgtttccaaaacaaaaacaaaaacaaaaaacaattcttagtgttgtaacattagttttttaatgtttacaagctctgtacttggttacatactaagcaactacactactttgataaatgttttagactatatcccaattgaaccacagactacttgatgcataataaaagttttgtaaatatttctacttgtgtgtatatttctatttgtgtgtggagagagaaagagactgaaggatccccttccctttttttctttgtgctaggacctctcactggccaggaacttgtcaaatagctagactggctggccagtgaatcctaggcatccaaatctccagcttccccagtctggggaatacaagatgcaccatcaccatacctactttttatatttaagttctgggactcaaactcaaaagtatttgcaagacacatactttttgactgagcaaacaattcctcagcctgacatttctatcttaaaatc

SEQ ID NO: 35251 - DNA, 1376 bp, Mus musculus
gcccatgtcctaaactgaccccacacgcaggtggacaaaatggccgacttctggccatctctggtccagggctttcatcttccacaatcctgtttcccccacgtgtggcatgggtagatgacactccagaattagaaatgagccctctgacagagtttccagggaggccgagtaaaagatgctcagtgcatctccatcgccagctgacaggggacgtcaggagacctggttggctgtgataccgcatgaccgaggaccccttgggtctgtactgagctctcattccgaggttccctgtagttttttcagaaatgtgtgttcccatcacatctgatgtataccttccctgcaatcccctcacctctgcctctcttgtgtgccgattttcttccattactctgccacctctttataggttcatttgccccccccagccatcccctctcccccagtatggggctatgctatggccccctccttcccaagcaccatgccacacagggaacatctggatgctccccttaggagctcctcacacccttccatggctcttgctgtggagtacctgattggatgcgtgtgacctgtcttgcctgccaggagacatgacccactgaccatgccagctctaaccccaaagcccctcagagccatcacactaagtccagagccgcagaggggtccctccttttagcagcccacctggttggagagtccacattgggtcaggtttacccacaatgccagatacttgaaacaatgagccctttgcgtgacagtattagcaggtggcagttgtcgtgtgaggagcgagagtgatgcctggacatcttgttgacgcttgagccttttatgtactttttatcaagtctttgtgtatctctacttattaataaagaaacaatcagagatcctgccttatttcctcttccccaaacactgcccgttttgcgagcttttagttctttactgaaacacccacctcttccagagcacagccttgggcttagccaaacctaaagcaaagaggaagcacactggtggccatgcaggtatctttgcctgcaggagcctgtagagaggagactatcttatgtctgtacggatggggcacctgtcaataataaatctgatggcctatgctgtggcaggaatagggggtgggacatccagaagacagaaggagtctgggggaagtggcaggcaggagcttcaccagggaagatgtgacgagacgatcacatggtacccgagcacagataaccagctacgtggcagaaagtagattagaataaatgggttattttaagttatagctagtcagagaagagcctagctatatggccgaggtatttgtaaatatactttgagtctga

SEQ ID NO: 35252 - DNA, 1194 bp, Mus musculus
gggttttgttttattatttgtttttttcctagcctaattcagtaagttctcaggcttccaaatcagaaggatggtggaatagagcaaagtgagggatggtcactgtaggctttgaaacgtcaaagggaggctgatagtggaagccttgcggggaccaggtgggctggctttgacaggacggggaatcgaaagcttcccagcaccccaacgtcctgtcattagtgtggcagtatctggcagggtctcagagcaaacctggagagcaggttgcctggaaacaagccagatcaccgggtgcttcccgaggcagcgtttgctgctgggagactagcttgttctgcaaacatgtcctagaaagaggcagctgcttaagtgccccagcaaaggccatgcagtagctggggacagctgggtgctgtgctcatccggaatgaaataggaagtctttttcctggatgaagctaaaatacttcatgttgagaaaagggaggagaacctccccatgatgactaaaaatgcatgggggcgggggtgtagaatctgcttcaacttccggtcccttcaaattgaactcatcagagataggaacaaacagcctgccttcctgtgatcagcagggcttagcaggcagtgtgtgcggtgtctgcagctgctggggcccacaccctccctcccaccagccacacccgacagggctgctcacctgagagctggtctgtcaccagccttcgccttccttggaagacttaagtatggttgattgcaaatgaatgtttttaaaatgttgtatttaatgcaatgcttcctgctctccatatggccacccaagatacaaacacagagatttccaagttgttttttccagaacatcactgactttaaaagctgtcacaacagaacttgggttttgtacagacgtcagagtgctaatgtgagaaaacctgggaatgaagccttccccgggccacctattgccgccgctggtgttggggctgtaccctccgatagcgttttgtaacaagacgctacagcgttggttttagaaagtaccagtaactgtaaagaaaccaataacacgttgctgagacaatcgtgaacccaaaatagcatgagagggctgaagaccctttgaactctgtggataaatcttgcctgtgggtataggcaatggtcacataagaagtgctttactcg

SEQ ID NO: 35253 - DNA, 1148 bp, Mus musculus
tcgtcactttcagacagaagtagacttcatttcaggtcacactgacatagacacagcaagatctcaaatgtgaacagagagcaaaagtaactaggaaattcatttagtgacagaaccagtgttaatagtttctgcttgccctgaaactcagtaatttttatgttttatttttattattttattatgttgtattttattaaaatagaacttatagactaatttggaatctctctttcccccacttcctgtagcttgatcatgacttaaaacatgcccatgagctccgccaggctgcgttcaagctctatgcctctcttggagcaaatgatgaagacatccggaagaaggtgagtctgggagaggggcgtcccccagtcctgacagccagcaggcagggagtgacgtcaacctgaaagtcgtggtgaagagcactaacagtgactgtttgaataaaataaagcagagtgacaaaaggcataattgaagaatgaatgggacctggatttggggggctgtttgtttttagaacatagagtggcatggccatgctggaatgatacataactggcctgctgattttgtcattaatatgaatcattatgttgcacacttttgcatgtgttctgataaaaatcatttctagcactgtgaagctttagacaccttgaaagatctaacactagaattgtaaatgttatttattgatttaccttctaatgccattgagaaattcaaatctctattgtatattgttctttaataatgtggcttagttttatgttttgatttaaattttttattttatttttttgctactgtgcaagtttaatgtgaataaaatctttgtggaatgatgattttatgtttagtgagtggtcatctgaactttccagctcttctgaaatgtctcactggtacctcaccccatgttagtgtgacactgaactcatgttctttatggaggtagttgtaggcaagaagtgcagtgtagtgttaaattctaacctggctcccccaacaaactaaacggctagaatttactactcaaaaacttacagtctgatggagtccacagaggattgcagacattaaccagccgatccacatgtcctgtcatgagttgctgtagtaacatgtttttctattga

SEQ ID NO: 35254 - DNA, 1197 bp, Mus musculus
ggtccctctgtgtagccttggctgtcctggaactcactctgtagaccaggctggcctcgaactcagagatccgcctgcctctgccgcctgagtgctgggattaaagacctgtgctaccaccgcccagcttttatgtagaatttttaacatttcatttttactccttgtatctggagtccatacttaggtttcattgcttattgtttgaaggtaataacttgtataaaccagctgctctgattgttacaggtgggattatagtgcaacggaagaaactatgaaggaagtaatggaaaaattgaaccatgaccctaaagtcccctgtaacttcaccatgacagctgcttgttatgatcccagtaagccccagacacaagtgaagctggttcacaggatcaatccacagacgactgagttctgtgcccagcttggcatcacagacatcaatgtcatgattcagaaggccagagaggaagagcaccatcagtgtggtgaatatgagcagcagggtgacccggggactgaggagtctgaagaggaccggagtgagtacaacacagacacgtcggccctctcctccattaatccagatgaaatcatgctggatgaagaggaggaggaggaggaggaggaggaggaggctgtaagcgctcacagtgacatgaacacaccttctgtggaacctgcttctgaccaggcttctgacctctctacaagcttttctgacatcaggaacttaccaagttccatgtttgtgtcctctgacgatgcatcccgttctccagcaagtggagaggggaaatgtggtgaaacggtggagtctggggatgaaaaagacttggctaagtttcctctgaagcggctgagtgatgaacacgaacctgaacaaaggaagaaaataaagaggaggaaccaagccatctacgctgcagtggatgatggggatgctagtgccgagtgagacagaggctggactgtgataaatgtaggggtgggatttccagaccctgtttttagggcagaatttctgatttattactggactttgtaataatgaaatgatggaattttggttataagctctgtatttagatgtatgtttatatgattcagatatagacttattaaatttcatatgagatttgattgatgaccatttttaagacattcacttccatagttttcagcacttagtac

SEQ ID NO: 35255 - DNA, 1199 bp, Mus musculus
tgcctgctttatagagcatatttttttgtgctgtgttggaaatggtgagccagtgagttgcacaactgatactgtggagttttactataattaaacataccttttttaatctttctagatgctaacagttaaaaaaatttacattttaacagtacagatatatatgtaatactataatggaataatggaaatagtagctgcttattatgaagtaatatctaacctttgtgaggaacactttattttctactttattgagaatgcgggttacaacctaacattgtggtctgactcacagtagtttgggttggattgtaatcaggaaagtgcaaagtagaaagtataaggaaccaacttacttcaatcaaactgaaaaacatgaaaaattctgataatgccatatgccaatgaaatagttgaaactacgataaaaaattcttgggggctggagagatggctcagtagttaagtgcactggctgctttcccagagggcccacattctgttcccacccacatggcagctcacagttgtttgtaattccagttttaggggatgcaccaccctcttctgtcttctgttgggtactgtatacatgtgacacactgacacacacaggcagaacaattacaaataattagatctcttaaaatttttttttgagccagggtcttactatgtagttcaggctggctataaactctgtaactgaaggtggcttaataataacccattatcttcttgcttcagcctcctgtgtactagtgctacaggcgtgtatcaccatggccttacattaccacttctggatagagcttaaattggtaatagtgaatatataaagtttgtttttttaactactacattggaagtacatctgctttaaacctttatagtctagatgagggaaattattttttggtttttgacgttttgatttcttttttcaaagacccagtcgttctcttacgtagttctggttattctagaactcaatatgtagaccaggctgactccaaactcaagagttctgcttgtttctgcctccgaggtgctgggcctaaaggtgtgcaccagacaccatgcctggctttaaaatgtcttattatttaacttagatttggtttatgtgtgttgtgcctttgtggaagtctgtgcaccatgagtgtacagtgcccaccagaagagagcataggatc

SEQ ID NO: 35256 - DNA, 1183 bp, Mus musculus
atgttatatagcatacagattttgacaaatgcacaatgatatttacctcttgtttagaagtgtttcactgtgctaacagccctctttacttggtgattccacctgcaccctaacttccaacaatcactgacagccaaagttttaccttctcaagaatgttaggtaatcagagttaggcaatatgcagtcttttcagatggctccttttatttaaaggttcttcatttttaattttatgtcttgttggagcaattgttttctacatctaataatacttggataccaaagcttttttacctactcaccttctaaaggacttcttggttgatcccaactttgatcagttatgaataaaggtatataataaatatctttgtctaagcttctttgtaaatgtaggattttaactattttggataaatatcaaatagtgtgatcataagtgtgatggattgatatttcatgatatatttattttatttaaaaataattttttttaaattaacaggtgtgactttgaggttgaataaccagtttgaattatacagaaatttctgtactgtggaatagcttctccagcaatgattacttcagagttaccagtgttacagtaagtatcatacttttatttatcgtctagagaaatgagtcagtattacagggtctgatgaaatatatcaaatatgttctgttattgagacagtatatttgaaatctaaatattagggcatgggattactctgcctttgctattgaaatgtcagcatgttttctgatgctaaagtcaggtattaatgtttttgtatcaggggtcagccagctattatactgatttgttataaattgaattacagctgtatttatttcctgtatactgattccagtttctttgttctttgctatgctagtaactgtattgtttggaaagtcaagatattcagtcttgctattgaaaataacacatttattaaactttatcttatattgtccttttaaaaacacatttactgttttaatttctcctactaagattccttctgttatatttttgaggcattctggttttttgaaaaatctcaggcaaaaccggttggtgtgtgtgtgtgtgtgtgtgtgtgtgtgtgtgtgtgtgtgagagagagagagagagagagagagagagagagagagagagaaagaaagg

SEQ ID NO: 35257 - DNA, 1157 bp, Mus musculus
cgactgccaagttgttccaacaggtgtctctttcactgtgcttatcctagtcattccaaagagcactaataagagtttgtcaaaaatagtcataaaaaaggcatccagttggctgagtggaatttacagtcaagatgattttagtttttataattgaacatcatttgatctttcaggtgctgctcttttaaaaaagcacaatttaaacatttgctagcatatactgatatacttatacgagttcataaatttcccttcaagccatttttctttgttacagaattagtctttcagtcacactttatatattatagagttagtaggtgtcatttccacattaaatttattcctttttatttgggggataaatttttttagtgatatatgacattggatagggagtgtatgcattttagtttattgaaatttctgaaaatagaaatgttaaaagtgctgcttgtcagggaagtagtagaacagagctgcattatatttatttgttaatttgttcactacaataatctggcattttctagggattcaactaatgaaactactgcccactctgatgctggcagcgaacttgaagaaacagaggtcaaaggaaaaagaaaaaggggtcgtcctggccggcctccagtatgtattatattttatctttatgcttcaatgctttcccataaataagcttgaaatgagttgtttgtcagttctagtattaatgctgttaatattttatgctttttattcctgtaacagaagagattcttgggaactttgctttggcttagcagtttcagagaaggaaatttgtagcattgtctactgtctgtacttgaaagcacagagggaatgttgaatgaattgcagttaagacatattgctctttgccctcaacatttttttccttctggtagctccttaatgtgcattttgatagtagtattttaacgatcgaggcaagttttaataaataggcttaatgattcatgagttgaaaatttagaagagtgcagggtgtcactactttgggaggcatctttacagtctatgcgcttcagttagcattcaagtatagtaaactttgagagatagtacaaatatattaacatgttaatattacattttattcatctgtggtctgatttgctattgta

SEQ ID NO: 35258 - DNA, 1206 bp, Mus musculus
gcaggctttcatgctgctctgtgatcttttaatgatttttagccaccaattaatgacaggtggcagagagggccttcagcctttggtgtttaatccagatactggactccagtctgaactcctcagttttgtgatggatcatgttttcattgaccaagatgaggaaaaccaaagcatgggtacttacgactttttcaccttgtcaaccttaaaagacagcagtagggtgtagggtaaatctaattctaaaatttacagagatttctctgttcttaaaataagttggataaaaagattaaagaaataagctggatgtggtagtagtgcatgccaataccctgtgctaattgtcaattcagcactgcctgggctccacagtaatttctatgtgaagaaaaagactactcccaaataacaataggccaaaatgtgaaaatgtcagtatacacatatgctgtcatctagatctttgagtgtaagttttttagaattacaaatagataagccagtgtggggaagacactatttgttatgtttttacaaacttttaaaagtacatttcagtgggggctgaagatagctcagggtttaagaaacctgctgctctcccagagggacatgggttcagttcctataacccacaggggaacttacaactgtcagcaattttagttctagggaatttgaagaccccttctgatctccttggacaccagacaagcacatggcccacatatatatacatgcaggcaaaacactcatacacataaagtaaaataattatgggggaggtgtccttttgggttgttgggtttttgggaaagggtttctctgtgtaacagaatccaggttatgctggactcgatttgtaggacaggctgaccttaaactcacagagatctacttgcctctgcctcccaagtacttgaattggaactcactaagcctggcaaaataaattgttttaattaagtaaaaatgagagtacattttgtttgagtctggagacagagagctcagtgtttaagaacacttgccgcgcttctacaggacccaaggtcagttctggcacccatgtcaggacatgtgccatatgctcacatagacaaatacgtatatgtaaataaacattaatgtgtttatatctgtaattttgaccgattagataatcaaatataggacaagcaccaaaaatgaagcctgttt

SEQ ID NO: 35259 - DNA, 1129 bp, Mus musculus
aataaaagtaacctacaaactgaatgtgattcccatcaaaattccaacacaattctttactgatcttaaaagaacaattctcattgctggtgggagtgcaaacttgtatgaccacattggaactcaatttggcaatttctcagaaaatcaggaagttttttttttttaaaaatcaggtatttatttcatttccatttccaatgctatcccaaaagtcccccacacgctcccccacccacccattcccacttcttggccctggcgttcccctgtactgaggcttgcacgagcaatgggcctctctttccactgatggccgactaggccatcttctgatacatatgcagccagagaaacgagctcgggggggggggggtactggttagttcatattgtttttccacatatagggttgcagatgccctcagctccttggttactttctctagctccaccattgggggccctgtgagcatccactatagtctcacaagagaagctatatctgggtcctttcagcaaaatcttgctagtgtatgcaatggtgtcagcgtttggaagctgattatgggatggaatccccggatatggcagtctctagatggtccatcctttcatctcagctccaaactttgtctctgtaactccttccatgggtgttttgttcccaattctaagaaggggcagtgtccacactttggtcttcgttcttcttgagtttcatgtgtttcacaaagtgtatcttatattttgggtattctaagtttctgggctaatatccacttatcagtgagtacatattgtgtgaattcttttgtgatggggttaactcactcaagatgatgccttccaggtccatccatttgcctaggaatttcatgaattcattctttttaatagctgagtagtacttcattgtgtaaatgtaccacattttctgtatccattcctctgttgaggggcatctgggttctttccagcttctggctattataaatagggctgctatgaacatagtggagcatgtatccttcttaccggttggaacatcttctggatatatgcccaggagaggtattgctggatcctccggaagtactatgtccaattttctgaggaaccgccagac

SEQ ID NO: 35260 - DNA, 1125 bp, Mus musculus
tgatgattttataaataccatacatcctattaaagtaaaataaaacttcagagtagtaatggcagtaaagcaattatcatgctattaccaaatctagacacttgtataaatgcttgtataaatctaccttcagattaggggatagtgtctagtcttgtctaaagcctttctcaactgacataattgataatgtgaacaaatataaggctctgcctactgaagagctttgcatcctgcttgctgttctctcctgcgtcaaacattcattgtcattcacacacacacacaggttttaaaaaacaattctaatttctttatactattttgtctgccagtcgccaattaatttctctggttcctaaatggtattggtcctgcgatgtatttccatttgctttcttcactctgaatctctggtgactatcgctatactgagtttcctactgcagactcctcacacccacctacctgcgaggcacctgcttccagttatgttacccatctctgtagtctgctgcagtaacaagctgcctgaactacacgctatgatgtaactgcctgagctacatgctatgatgtaactgcctgagctacatgctatgatgtaactggtaggaatggttcttccacagatttccaaataaatgtagctaattataaagttttagaatttaaatgttttatacactgatatgtaatagaattaaattgaacatttcttaaatcaatttattcatattgtctacacacacagttctgatttaagtagtaccagtgtacttattttatcttaaaacttgatctatttgtttcattaatttgaaaaaaattttcagtgggtatagtggtgtgtgcacccagtttcaactacctgggaggatgcggcagggggatcacttagcccagtctagacaacacagtgggatactgtcttaaaactaaataaaaataaaattaactatttcagagtgtcagcttatttaactctccttctgctgacgaacattagattatttctagaaattggtatcttgggatttttacttaagcaatatatatagtacattttcttggtgtattttcttatttgaacatcactcataatccttccttaaaggtttattt

SEQ ID NO: 35261 - DNA, 2128 bp, Mus musculus
atttacaaatctggaactctattatttagagctagaggcctatatactgtgatagcttgtatgggggaagaaacgcttttgatgtgatcgggtttgttttgtaatcaaatgattaaaggttggtcccttttgcagtgacagagcagcatgtcagtcacccatggaaatgttggtgaatgtcacctcggaaagactgaccaaaaaaatcatttgtactctaatgttggacttatctcagtacagatgtgtgtgtgtttttctgaaaggaggaagatattttaaatttttaaaacagctgtcaaaataaacactgttatacacctgttttatgaaaatcagcattgagtaaaaaaaatatttttaactttattttcctgttgtacaatttaaaaaccgttttaacattttgcctttttatgttttaaaagctaaccatttttattaaactatgagtaagcagctcgttctaatcgccgaagagtgtttttggagctcgctgggttttgttgaccttgtaaagcagacattgaaggaacagagcatggacaagctaaaatagagttctaacatcgtgcatctctgccaaaaaccacacgccctctgtggatggatgggaatccccagattttatatactcttgaataaaaaggtttatttttatttataagtgggcataagataagtgcccatgcagccatttttccaacagatgctgtacaccgttcattttctatagaatagtgagattcaaatacagtgcattttctattggtctttgttctgtgcatttttagcaacttctaccagcaaataaactattctcagtaaaacaaaaatggttctcaagttatcagtctcactgttgttaacacttgtttcatgccctgccaaagtcacgttacacagacttccgttttcttatagtcatgaaattttcctttgccattcagaagtaattttaagatgtgtaacgtaactgtcttcccatgcactcagtatcccctcaacccactaatgttgtgaaatgtttaccaatcatagatgtatgtgctgcatagaagtctgtgcttagaaggtggcgttctaagcttaccgtgaaacacagctacatttcagtgttaagtgtgcatattaagaaaaattcttttggagaaagaaattctgaatcttcgggacagtcttcagtggcttagagttacaatcagcttacttttatgacttgctattattttaaaaatccacatagctttccctgattttagtgtaggcttccaaatttccaaaccagtctgtccacagctgtttctgggctggttttttaaaatagctgcaacagaattgagaggctttccctttttaccaaaaatgaacattttttaaaagtatatgaactctatgattatcttttgtgtgggaaaataaaatacgattttattcatccttttagtagacaagatttttctcaacatttgtacagttcagagatttaaaaaaaaaaaattcttggtcaccaaaaatgttttacctactaactcagcaagtcctaggctccagttaaaacatctggggccttgctctctcctagaaatgtgggcttcactggaactcaaggggcaggaatgaatggactgcacacctcagccctgcctcactatagttcttggccagggacccagctttgaggaaccctggaataagcacagataattctttgcctgacgatctcctgtgaacaccacatgctgatttaagggttacagactaccatgcaacaacaaaggcggcttaatctctactccagtgggtttccaagttcagtttaaagtcaatcaaatttttgtattttcagtgtctccttgattggttttgctagtaattctgtaaattgtacatttgcaaaatgatggttttttttccttttgtacaatttgaaactgatgcttcacctttcctttaataaactattcaaaatcagccttgtggttatcctgttgctgctcctgggcaaggattatggacagtttcctttctgctgcccttgagagtttgttctttcagatattttgttaaatgatagtagttttggtgggttttggtgtatttgagacaaggtctcattttaaaccag

SEQ ID NO: 35262 - DNA, 1314 bp, Mus musculus
acgctgcccacatcgttggcctatggagctgagcatggggctgggggtggttgacttcggtcacgcacacagtgatggctttgccttccactcaccagggtttgtggatgacatcatccagccatcctctactcgtgctcggatatgctgtgacctggaagtcctggccagcaagaaggtccatcgtccctggaggaaacatgcaaatatcccactgtgagcagatggaagggactagagcaacagttgaaaagctggccttttgcagcgtacccctccctgccttttacaatcatgaaaaaatggatctatgtatcttggacactgattgatttgcataaagagttcttgggcctggagtaaaactatgtgctctattaaaatcattggtactttttgaataaatatttcattgttatagtaaaaatctcaatcttatacaagaaagccagaaggaggcgggggatggaatcatagttgactgaatcaggctctggttcacactgatgtgggtatgatttttgtggccctcagaggtcgacatgctggagcttgaactccgtgtggggtagtgagagcagagagatagtgggagatgctgtggtcagctgggctgggctctgtgctgaagaggctaagagttcttagtctttccccagctgctcgatagctatgtgatgtctcgatattcccccaccccatgcgggctccacggtgtgatacaccaggagggttgtcaccagagcttcaccgatggtagtgccttgccattggatctcagaattatgagctaattaaaccccatacctcttcataaaattaacctgccttcaagattttgttatagtaataaaagcggattaattcaacatacttgggtgttgtttttttattccccccaaggaattaattttaatgcatgggtaagataatgtggctttggagcagcttattttataggcctcagtttctttctttctttttttattttaattttttattagatattttctttatttacatttcaaatgttatcccttttcttggtttcccctccaaacaccccctatcttcttccccctcccactgctcaccaacccacccactcctgcttcctggccctggcattcccctacactgggacatagagccttcacaggacctagggcctctccttccattgatgaccgacgaggccatcctctgttacatatgcacctagagccatgagtcccaccatgtgttttctttggttggtggtttaatcccagggagctctgggggtacccgttagttcatattgttgttcttcct

SEQ ID NO: 35263 - DNA, 1137 bp, Mus musculus
acgctcctccatggctcccttctgttgtgtcattcagtgcagcccaggatgctgcagccctggatgctgggctatgggatggtgcttgtatttacggtgggttcccagctcaacccagccaggcccagagttcgactcctacaagattgtgtttgataatactaaccatcacagtgttcaatcaacgatttgaaaaagatgttcttagacaggcagagtgtggggctgcacacctttaatcccagccctcaggaggccgaggcagtcggatctctacattcaaggctagtctggtctacaaattgagttccaggattaccagaacttttgcatagaaaaatcctgtctcaaaacaagcaatcaagcaatcaagcaaacaaacaaaccaaacaagatgttctcagaagcttagagcaagggttgggcaagtatccttttcccttataataaggaaacaacccatcagaactgaatgaagctgacccttcagaagccacagttaatgatgacgatacacatccgggctggagatgaggcacagtggttgcccagtatggatcctcagcgcctcagaataaaaagcatgaccctaccgaggatgtggcctttgttgcccctctttggtgccagatagccactgtaggtgtgcttgtcacggctggggaaagatagcagcgggtcacatgaaattcagcagtttcttctgtctccatcccgaaagggttcgactagacttcccgaaaggtgcttccgacagtcctgtggctgaagttatttcctggtttcctaaagctgtcccatctgtcttctgtgatgtctcatggctatatcctgttagcctgagtgcttggggggtgggggtaggggtgggggtgttccatcatttttagctagtcaggaaatcacttgagtacatgagtttgagactagcctgggcaacgtagtgtgagattccatttaaaaaaacaaacaaacaaacaaacaaacaaacaaactgattttataccaacaagagaaccctaccccaagcccatagctcttatgttaaatacttttagtgtacttttaaatttcctctatgttcgttctttcttcttcttcttcttcttcttcttcctcttcctcttcctcttcctc

SEQ ID NO: 35264 - DNA, 2053 bp, Mus musculus
ccaccagccctgcacttcatgggttatcatgtacagcagcaactcccaaggtagcaaagttgaatcgaaaacgatccagatctgaaagtgacagtgagaaagttcagccacttccaatttctaccattatccgaggcccaacactgggggcatctgctcctgtgactgtgaagcgggaaagcaaaatctctcttcaacctatagcaactgttcccaatggaggcacgacacccaagatcagcaagactgtacttttatctactaaaagcatgaaaaagagtcatgaacatggatccaagaaatctcactctaaatccaagccaggtattcttaaaaaagacaaagcagtaaaggaaaagatgcctagtcatcattttatgccaggaagccctaccaagactgtgtacaaaaagccccaggaaaagaaaggatgtaaatgtgggcgtgctactcaaaatccaagtgttcttacatgccgcggccaacgctgcccttgctactctaaccggaaagcctgcttagattgtatatgtcgtggctgccaaaactcctatatggccaatggggagaagaagctggaggcatttgcggtgccagaaaaggccttggagcagaccaggctcactttgggcattaatgtgactagcattgctgtgcgtaacgcaagtaccagcaccagtgtaattaatgtcacagggtcccctgtaacgacatttttggctgccagtacacatgatgataaaagtttggatgaagctatagatatgagattcgactgttaaatcagtgggtctttaaacctaccccttggtaggaaatagctacagttttacggcagctatggttctgttggtttaacttgccggagctcctgcatatagatcacttgtatcaagtgttttcattgctaagttatatgtgttagtgtcggggaaatagtttgcagataatggaggagtaaccctacaactatatgttcttagttcttacagaacctcatagtttgagaacaaatgctgatgcaactgatttatacaaaatgaactttggcaaggaaataacaataacctcattgtttatggtcatgctttgtgcataatcaaagttgatgattaaaatgtaaggaagtggtatcagtcagtccataaagattgcgctaatttttttgtgaaaaagtagccattagtttatcaggagactttgtgctgccttcaaatgccgcactgatatttctcctgttgaaaagctgatgtgtccagctcaacctttgtgctgacataataccatttctgatcatgaaaattggctactggcgtgtatgtagcagttcttaaatcagcagtattatgaaagaaaatttccccctcattagaatgtttaagaaatctgtcttttaaaaaagtgaacaaataaattccatcagaccacaaatgttaagctgtttatgctttaaatatttatgagttcagccctcctttctagttatctgatttacttctatgagaaaatcctaagtcctttcactttgagcaatgttctatttggtaaataaagtgaagagctgttttattctgaatataactgaatttatatagttcatgacagaatttttaaaaaatataaaaataatctaaaaattgggttttatttaaatgaattctggaataatgccccaaatgtgcccagacttatgcattatacttattgccattgacaacttcttttttatttatttcctatttgccacgggctttaccttgaatatgctcctttttttccttttctttcttttcttttttcttttttagggtgctgttcaaaatgaaggcttcttcatcaaggcctttagtgaagcctgggcatttaggtctaaagctcggaggatcttctttagatgctcttgcatgtaaagcacaaactgtttcagtttaatgtacttcctcctactaactttatggggaagataaacattctgttgatgggaggtcctagtcagttgcttgagagagcacagcccaggttaaacaaggactgactaggtgtagagagaacc

SEQ ID NO: 35265 - DNA, 1264 bp, Mus musculus
cccttccaacaacagccttccctgaatctgtgacgcattattgagtgtgtgaggagctggagcagacaggcactagacttggatggagtcgtctcgatgccacaggaaatcgttgatttattggtcttcatttcctgattcctcctctcaacccatttgcaaacaatgtattcagaaactccaatttctctctctctcttttttctaaagtatatttccctagatatcctcaagggtggctctccgcctccgccttcttaggaggatattaaaaatccatggtgaaggatggacttcttcagcatgcacaatgctgtgtgtgcttggtgcacagtaggttctcatgcaattatgattccttgcctagggccaaccccttccccgaaagctcaagttcattgtttttctcagacataggtcccaggaggttgaaaaccttgtctctagagtcaaaaggatggagaactagtgaatgagcaggggaactcgaacagctgcctagtaggactcttgcagggttttactgacagacaatgggggctccaggagctcttaagaatggaagacgtgtctacagccataccaccctgaaggagcctgatctcgtctgatctcagaagctaagcagggtcgggcctggttaatacttggatgggagacctcctgggaataccgggtgctttaagaaaagaaaaaaaaaaggaaaaagaaaagaaagaatggaagccgtgggctcctgagggaaggttacctttctcggggcatatgctagcctgcctgtaaggtgagcttggctttgagttctcagtctgtccctctgccttcaagtcaaactcagagtaaataatccctgactgtcacattagaaggaagacatcatactccaagcttgtcaacgctcattctttttgtgtggttagagaaggatgcccttccctgcctcactggctcagcctccatcttgcagaagatgaaaatctgccattagtgtccctacatccaaatctctgattcaaacacactccctgtcggctgggccttcactaacatgacagtgtagacttgaaaggatttaaattcttcccaggcaaaaagaagtaggagactcggcacagggaaatgtagagcaggcagcggctttgaaaaatggtggcagaatggccgcagtgccctgggcttcaggggagcttgagatgttccctcgttgctgcaccacacatacaatttcagatgacagagaagtgaggaaacctctgagggaaga

SEQ ID NO: 35266 - DNA, 1214 bp, Mus musculus
aactgtgagccacctttctcttcagtacactgcgtggagtttggtgatgtgtgagggggctgttcatattctcccagcccagcacatctgggaggtaaattaagcatattgggaggtgagctggaagctcaggccctcttgggagccattgaggaaatgttgtcttggttggttggtgtgctaaatgataggtccctctgggcatgtaggagtttatgccccaaggaccacattttacattttcattagccctctagcttgtctaatctcctaaccctttcaggcttaacctactatctataccagagcttctttcttggagtccacactgattggtgagaagctgaatggcggtgtctctgacctatctgctaccctaatgaatctgtgggctcctttgtgcttgatgaagttgaatactgctggaggcatgttcagagaggcaaccatctctcctgattgggcaaggccatcatatttccattattgttcccacagagcacagtggtaaccatttctactgacatagcagcttccctcgacagcaggtgatgtccaattacagactgcagagtggatggacccagagcctctgagctgggtcgggttttgttttcctgtgatctgagctgctggaagagagtgtcccactgaaagcccaattgaaagaagatggtctacactgaagtaggctcagtggaagcctgggaaattgccagcaaagagaagggctgctggttgttttgctgggtctgtacagagagggaatttgaacctctagtccttactttctgctgagcacagggtagcataaattatctaggatcaagatggcttccacaccccgttgactcagctagtggcaggtcttgaggttgacacagtaatgatggtcattgtactagtagcactaattgctggtagtcagcaagtggtagttgctgaagactctataggagttacttccatgacctttgaggcctcaccacaccctgcaaggaaaatagtattttgcatgtgatgagactgaaactcagaaagttgtctgtggtcacaagactacagctggcagaggtgaggcctcttgcccctagccacttgtcagtcttccggactctgtgttcttatggccacactggtggtctggttttcttggcatatgccaggctacttgttctagggatttgtccctgggtctggaatggtctccccac

SEQ ID NO: 35267 - DNA, 1200 bp, Mus musculus
cagtgatgccttggtgcatggggctcagagaggagcaccccaggggagctagctagaaaagcctgcaccccctagaagactgctttttggcctatatttctcctatgacaatgaggaaggaaaagccagacatcacctgcagccggaggcctgttgctggggcagaaaggagctgagccccctccgtcctgcctgaaggaaacagcggattctgacgcccaagaatggctgggcaccagccgagcggtctgcagggatcgttaggccagctatggtgttctgtggctaagcatggctccagccaacactatctgctcttcagtccctgactgacttcctcagatcactaagacttgaatccttgggaggtgggggacgatgggagtgtgagtctttcgggagccaccagcatgtccccttggagtaggttagaggtcacttgagaggccccgcagagcagtgtgttttgtatataattctttttccttgggaacagaagactaagcgtgccggttcagagtctcctccagggctgtgctgcctgcccctgctgccacagttcttgaaacatgtgacaggtctaccagatgttcctctgcctgcagttcctggctgtggattttgatactggttggctttcctctgctttttaaatccctgtgtttcgtgcccatgggattcttatcaccagcctttgtgaatggctccacagctcctatccctgggacatcctgtcagtttggttataaactgagccagatgtgatgagccaccacaagcggacatctgtcatgcccagcaccaggttctctttgaagaaactggagaagttgttctcataaatgtattcgttcccaccagcagggactgggagagggagctatgttgttaaaacgaatcagtgaacttaaagaaaagtcctcattatggtgcccccaccacagaatggcacccttagaggctggctcctcaagttttggtgccccagccctgaagcagggccagctacttggaattaggtgaactacccccacgtggcagaccaccagcagcagtgactttgacttctggtcttaaagcaacccccattcagctcaaaaagcgattggtggatttcagatcttttgtgtttttctcctctggttgttttgtttgtttttctttcactgtttgaagttctgtctgttgtttgttccattc

SEQ ID NO: 35268 - DNA, 1140 bp, Mus musculus
atgataaaagagtggtcgtttataaatgcatgcctgagggccaagcagtgacctcagtgatgtacttagacatcttccgtgtaagacccttttagccgtcttgttgggagtagctttatgcttccttctatccccacagagttcgaggctccagaaggattgaatactttgcctaagccacacagctggtgatgtgggcaattgtgatttacaggtttatgctcagcatttgcttatgaccaactacatatgtaaactcacataaatcaccatttagtaacttccagaactccaaccacacagtagcctgacaaatctttgttacattctatgaattgaaagtcccctcagcaaagttgactgtaagttcccaggaagaaataacaatctgaaatgtgagcgtctccagggaaagaaggcatgttgagggcacattaaatgaacaggcatttcacgtggagattgtactgtgcagagtggctcatgtgcacacaggctctctgaatgtttattggaggacacctctatctcagtacttcagccatgacagtaggtcattctaaagtgtgttagcgataaaaggctacatagcctccagaactcactacttagatgccttatgtctgtacgtttttcacatgtgtgtttgggctcttgaaattggcaaaatacaaatccatgtgtaagtatccagattatatagcaggtggtcaccagttccattgtaatcactggggtttgaaactacgatgataaggtacaaatatcagtcagtcacaaggttcttcatatgtaatagtgggctccaccacctctgtggtgacaggagttctgtctggctctctggttttactctctgtgctgaatctctgctttaacatctcctcggctacaaaattaaaaggaataggccagtgagattgaaatgttccccagagtgacctgggacaaggtttctacccattgagaagatggaagaatatgcttgggaagtgttggtttataggaattacaacacgtgagtgacaagatttgcgcccaccaccttcaggggctcctcttacttggaaagtatggggtgatgtgatgtttcaagttctagagatttctgagaaccatgaattctaaaagtggcatggg

SEQ ID NO: 35269 - DNA, 3011 bp, Mus musculus
cccttactggttttaggtaactctgacttttactcagctggacagtatcttttcagggtgttcctaaaagttgtaaatggtgacaacaacacattgtctctctgtgcatgctagggttccatccctcgctctgcaaaataagcagatcagaaacccatgactgcttctatgttatgtaatctgcatgtctcgcttactgagggaatcttctgtccatctaggttgttctccatttcccaccgtaattcgttaacttaggggtagcatggtgaatagccagtgatagaagtggtttctttgaacggacctagttacttagaccaaatgatacaaatgttaacattgaagaattaatgcattttaatgctttctttcctacaccagctggagaaactagccagtatggtagcttttgttttatgagcagtactcactttatttaggagtttgttcagttgctatttgtgacctgtctgtagtcaccagcgcccagttttagaatgttcccctcattgtgctgctgtcctctcctagtgggcctttggagtgacgctgtgggagctcatgactctgggccagacgccctacgtggacatcgacccctttgagatggccgcttacctgaaagatggttaccgaatagcccagccaatcaactgccctgatgaactgtgagttttttggatctcagacatgagccttggtgcatttactatgttactataaagcaggaaagcacgtaagatactccttcagagtaaagaaaaaagtagaggacagaactcagtgctgacctctgctctccacagacatgcacagacacatgcatacaaccacacagacatgcacatagactacatgacagtaaacacagacagagacagacacctttctcatcctggccttgccttccttccttgcctccatcatggcggtggggtacacagggcctggttgggatggtggcacagcaatgtgttgtctacagaggccctaaaaggtttccctgccagttttagatagtagctttgctgtagatccaggagtcttaatttcaggtaacacttcttcctagttcttcctcaacagcgtccaggacaacgcagcctgttattctgactgttctgtgtatttacacaaagctctgaactttctgagtattgtattctcataaagaactgaagatggttgtgtgtaatccaaagaacttaacttcctttaatcctgaagctgctaacagtacagctaagcgattgctcatggctgtcctccccagcagcccattaaacagagcacataactggcaggacgctgacggaggcctgacacgtttccatgtcactgcaggtttgctgtgatggcctgttgctgggccttggaccctgaggagaggcctaagttccagcagctggtccagtgcctcacagagttccacgctgccctgggagcctacgtctgacttctctcccagctccgccactcagaagaaagtgcctgtctgtcacggatgcccctcgtgcagcgcagtgcctgcaggggcacactgtctccagatcacccagccttagcagtgcttccaaacctcagcttttaacgatgacgtaataacgcagagtgttttctagataccacttttactaggttgaaccaaaaggggttttgtacattttttggccaaaaatttttttaaaatatagtgactttggactagggggtgcattcttttaaaaaatgaataaacagttttaaaaattatttagacacagatatttggaatagctgtcttagtgccaactgcttttattcttaatgttttacttcattgaagtaatgtaggtgactcacctttaaagctattttaatattttggtcactacttttgggagtggtttgtcttcaaaatgcggtacttttcttaggaaaaacaacattacgaagttgtctggtttgccttatacgaagaaagatagtatattaggaaaattgaaaaagtaaaaagaaaaagaaattacaaagtaaaaataaaaaaaaaaaaacatatcgcccccgcatggaaaatcgcttgtttagtgaccatggctctgctcacatttggggaagcaggtctgagttcacatctcagtcagctttcctgtgagctggaagaaggctggggcaggcttgtggaaaacagtggtgaccttatttatttttgctctccggggaaggagaggacacagttcctgacagtgacccctctctactgctgcggttccctctgtgcacgcctgggcggagctacgcacagagccggtgcttctgttgttgtgggtttggggggttttagttttggtttttggtttaaattggtaatttttatgcttatcttcaaggctggcttaagtataaatttgtttttttaaaacacttgaaaaattaaaggactcattttatatgctggtattcaaaatactgctcacagtgtgtgactgttggtcgtgtcctgaaagtcttggagtcacattttatcccctgagagtttgactcaggttccaaaaccctaacagaagaacagctgactctgctcagccgccagggcctgttaagaagttggagttactcctacaaggacttatcatggagagagtccacaaatacatgtatgtagttacacacaggtttggtctacctaagggattgtcacctgggcctgtgaagtgactgggcctgcagctactgcctctgtgtctgtcctctcagggatgtgagggagaacatgggtctgttctattaaaataagtcttgtgaataaagagagtatctgaaaagacagcttccacagtccaaggctccaggaggcaagccaggagctcagtgtcccgcatagggcgtcctgcatatggtgtcttgtttatgatatgctttgtcctcaaatgtctgggttttaaaatgcctcctttgaaccttttgtaacttaagccactttgttaatagcctgcatcttagaagggattcagtcaatgagtgctagt

SEQ ID NO: 35270 - DNA, 1101 bp, Mus musculus
ccacttttgacaggaaggcctctaagcagtccccacctcctaaaggctctacccccttacaactgggaccaagctttaacacatggacctctgtggggacattagcccaaacgttagcatcatctggtccctggcttacacacatacacacacccgccttgtgccttcacttctgatctcctctgtaatgttgttccatacctactgcagtctagcaaagctccctgttctataaaacccacctctcaggttcttcagtatccttagtctctgcttgcagtctgaccaccatcaaatccacacacacccccaacatcaggttatttatagcatataagtgtcacatgagcagatgggagggcatctcacatttagaccacaaaagcagctggccatgctagaggccccttggccctcttaacaccaggactatccagttggcaccccaactctgtcattatcttcccctctctcttgcactctgaccctgcttcccactctcatcctcctctctagccgctcccagcttcccttgaactccatcctagtcaacagctcctccttcttgctggacagagtgttcctagatatcctctccgttagcacagcctcccatgcttctcctggacccctcagacttgtatgcatggttttctctgccaatgactttctcagcttccagcacccctccctccctgccttcctgttagcattgagttactacttctcagtgagttacctccactccactcagcgtctgccctgacgtgggcccagggtccttccttcctggggtaatggctcactttgcaggcccctgacaccataggtgccaggttcagtgacattctctccgtggcatgtgtcagcatatcgtccttgaactgccttctgtaactttggcttttcaaatcctactttgaatagttgttcttaaatgctccaacctcccttctagcccaccacccaccagaggtaatgggaaagaaagcttatggtgatacaggggcagtgggcctgtttagaaattgttctttggagcaaatcccatctgtgttgtcaggaaaccagcagttcagttcacaggaatcagcagcggca

SEQ ID NO: 35271 - DNA, 1112 bp, Mus musculus
actagctctgagttgctgaaggacaagctggtggggctcctgatttatagtattcctccttcttgtttattataaaaggcaagaaaagaggaaggggtcgtggtaaggtggcaatgggggtgcctatgctttttagactgctccctgctatctcagagcatggatatctttggggacccaagaaaactggggtgctggccaactcctgagagtgctggccatttccctagctgtgtaggctctgtgggaccatctggggctagcaaagtgcaggcctagttgaagcagtctgtgaggctggaccacctggggccagccactttcaagctatcctagatgctgactttgagttaacatggggacctggcaggatgctgggacagatacatgcaggagaaaatcttttcttaggtgtacatttgaaacttttagacccagggtcctggtagttgggagaggggagtccccaaaaccaaggaaaggggatcccaccgtcagaaataagtggacagtaggcaggtaggggaacaggctgttgactgacagtacttatctggagtccattcaccaggagagaaggattcatcctattccctgaagcttacgagaacttaaatttacaaaaagaaagaagttttaggcatgttaccattgccactgtttgtaatctacattgaaatccatattgtagagaacagactcgcctttctgtcatagtagaagctcaggatatgattctgggaggacaagctgggggagggcagggaccttctgtggagcagcaaggccaacacacacttgatcttgatattcagtacaagtacagaccatgaaagaggggcttcctccctctgtccggaagactggatgtatctatcagacagacagttttatcagcgcaataaaaagcacctgtaagtctatacttagaagacagccataggaaatctaaaaccttgagcttgtgactgttataaaagcagtagtgcttttccagagctagattgatagcttattagaactgcattgactcgggttaaaactctgggtttttgaagtctgaatacaaccatagcacagcaaaggaaagaaatctgaagcattttttttta

SEQ ID NO: 35272 - DNA, 1635 bp, Mus musculus
ttcctgttctcttggaactgtgtgtcacctctattttcctcctacccccgccccccccagcccagaaaattaaagcaattaactgaacagtagtaattacattctagttctgggtcacatggcccaaaccaaccaaacccgcactccacagtcaaatccaactttaatctaacaaaacagcctctgagggggtattgtcgagttcttccctggcagagtgggacacattggcaggcccctgagaggagatgaaggcccgtggactgtagattcagcagcagctccttggctgcttccgcctcttctccttccctgaaaaaaataaccatagagccagaaagcacaggcaacagtgtgttctctgggctgacccggtgacagacagcaagaagttactggaaggatggggtgcgcttggcagctgagggctgaggcagtgtgtaatctactggcccaaccattgacacacatggttaggctgactcgccaactcaatgtgtgatgctgggtggctcagggacactgaagcctagggcacctgccatcactgcaactaccattgaggaagtgagaggagtcggccatgactccggacactccatgttgtcagacccttggatactaatcttgccgaacgttgttctggaaaagctgattccttgatgtgtcctcacctctggcgtggtacgtttgaaatctttgtatgaatacctttgggagtgttggcagctgcactgcacgcatcttggagtcactgtggggtttccagaaggctgctgccccagggtactgcaacttgccccccagcaggctgtccttgctatttccactcattccccagactgaagaccttcagagtctcttagcagagtgctcttctcaaagcagaatagctcttatattctaaacgctcccggactcactgcccctgtctgcctttgggcaggcctggggcagtgactctaatcagagcagcctagccccatagcattggctcttctttcagactgctggtgggcagagtgaattgcctccacaaggcagaactccaacaaggaggttgggatgaattatggaatctctcaaagaatgagttcaaaatggcagcctgtgtggcagggctgattctgtgagtgggcccgtcatgcgactccatcctgggagactgtgtcaaagccggttctgatgatgaagagaggaagcaggaccgccctgggtacctcctccagaaggcaaggaccaatgtacgagcataatcgaaacgtcacgtgtttagtttttatatgtgtgtacataattatacatagagatagacttgtgtatacacccttcgcgcgcacacatacacacactcacatcctcacatatacatgtgctcagtgtatatcctcgtctctcccgctcacaacttggaacttacattgtgattccggtttttggaagttcaaaagtatgcagtgtattgaaataagaaataactcaatattgtcaaataacttgtggttgtcttgccttcaataaaatagtgcatagatgtgttaaactacaagcaaaagtagtccacagaactacctttaccactgctttttgtacctgtgtgcacaggtgtgcatgccgtcgtgggccagtgtcccc

SEQ ID NO: 35273 - DNA, 1225 bp, Mus musculus
caaacagcctctattgctacagagctaacttgaagtggcctagcagctatgaaagctgatagcttcagctagctggaaagtacagcctaccgacagtgtgagttccagggagagggctctaaagtagaatgccaacatcacatgtagattgttcccggctgtgtttaagtagatcgtgtaaggagacactctgagaaaaaagtggcttccttgccaaaaaatgtagggggctacattgttagaaaagccaattgtatctaggtcctaaaaagaagagaaacctaagaggcttttgagtcatggccatgagagcctatatatggaggaaagatggaggagtataggactcttctgggctgagtaggcgccatcaagtgagatatattcccattccagaaacaatggcttcaatgtctgttgtttcaggattctggagttaatattctacctttatccttaccaccaacatcgttcgttctctctctctctctctctctctctctctctctctctccctccctctccctctttcctccctctttctctctccctctttggttttctgtgattctgtttcactctatggccaggctgggttggaactcattatgtagcccaggctggcctagtgcctgtgctgttcctcctatctcagcctagcaaatgcttggattgtagcaatgagtcatcacaactggtccatgcttctttcatggatgactgtcttgttacttgaaggagacttacaatggctccaaagggtcagagtccacagtggtcggggcagcatagcagctggcagcttcctcagctcttgaactacaaacacaaggcagagcaaactgcaagtaggcaagtcgtttcgtttgagtcttaaactccaaccccagtgatctgctttgtccaagcgcgactgcactgacttgggtcggagagtcattcttcagtaacatggtcctaagcgggagatggacattagataagaagatagagagaaaatctggggtcgggaggtctcatgcgagctatgtcttaggacaagcaactacagcatctcagacaccattttgagagaagaaatgggactaagtcagcagaaactgtcctacgaagggacgaagtcaacaggaaggtaatcaaacagtgttgcacaaggggagcaaggggtatctcaagaacattacagaccgggtacacagtggccttggactgataaccatagccc

SEQ ID NO: 35274 - DNA, 1107 bp, Mus musculus
tagagttcctgacttgttttgtttactaaccccattgatcctttaagcactgaaaaacggagtcacaatgcaatagttttggttcattgcttgctctctctctttctctctgtctctctctctctgtctctcatacacacacacacacacacacacacacacacacacacacacacacatattcatgaatgaatgaatgatgggagtagttttgagctttgccattcacaaaccctagtaatgtccttgtagcttgggaatctattagaaatgcagagccttgggatcccaacccacatttgacaattagaatatgcattttaaacaaaagtcccagtgcatattcaggtttgagaagttagctgttttttttttgtttgtttgtttgttttgttttttaaagttcactcacttagcaatcatcaattgagtgtccgtcatctgacaggttttcctctagcataatacttggggtacaccaatgatcagaacaagcaaatatctctcctctttcagcatacatagaacaggaaatcggtattaatcaggtgataagcaagaaactacacagtatgggggcagtgaaagagttgagactgagtctcacagtgtagcccagactgatctggaactctgtgcttctgcctcagtttcctgcatgctgagattacaggtgtgtgccccaaaacctagtacctatgtaatgtgttataaggggtctagtactgtgggaaaatgaaaaagaaaaagccaaaacaatttaaggttttccagaggatgtttgttggaggagaaagacatggaagggttacagcttaaaactgaatttaaaaaaaagcaaactatttctcttaagattatagactagggtcttgtataaggtactaggtatccggatatgcttataaacaaaatacatcatggaatgttcatttgtgttggtgtgtggggatggtgtttatgtgggtgctcttgtgcacatgcattcggaatagtatctgcataccacagtacatgtgtagatgtcagaggacaacttgaagcagttggttctccttttaccctgaggttctcaggctgaatggcaggcacttttacctgatgagc

SEQ ID NO: 35275 - DNA, 1194 bp, Mus musculus
ttctgcacttatttcaacattattcagcatgtactcagtacatttcctagttagtaccagcctggtgaagtttagcacacctacttattgtggcaacaaaatggcagtactattgttggaactctgccgaaaagcattccttttacttatcaagagtaatggaagaatgtgtctgttttataccagacaacctgtgtaaacgttaggtttttaagtacagatccagtcttataattctgccaaatgctccccatttattagcaaggacttaggagttaatagtgctttctttaagatagtcttgggactgttgctgaaatacaagtttttattagagacttgggactgagctagatgagcagttagtgtaatcctcaatgtcagttttcctttctgaaaaatgtttatagatcctaaagaatagcaactgagcagacagggagagcagtaggagctagcacggtctgagtactcgggctcagttgtctcctcttcttactttctccagaaaaataaccaagtacactgatgtaaacatggaagactttaagtgtcctatttttcttggttgcattatctgtgtgactggcttaaatggaatacacagaaagacagtccagcaactcacggctaagcacggaggccagtacatgggacagttgaagatgaatgagtgtacacacctcattgtgcaagaaccaaaaggtaaacaatgccttagatgtggttgagcgtgcaagtcctgtttaagcactaattctctgtagaccaccttgtgttctgatgtgtcattgccttagtttatctgggtttttttttgccttttaaattcttgagaagatagtttgggtcacagtctagaaaaattaaggaactgtccttgttattgtccagaatatggaataaacataaaatatcaaaagttgcccatgatgtttcactacctgacttagaccttgatgaaaaaaaaacaaaactcttcacagcataacaaatatgtatagctgagtggtattctttctcatgactaacttcagaagcttagttaagcacttagtgggatgaattggtttatattactgcatttggattggggtgcgggtgggtggtatgggtagagttcccgagtgctgggcaagtgctctaccacattttccaactagtctatgaactagaatttctttctttctttct

SEQ ID NO: 35276 - DNA, 1132 bp, Mus musculus
actgaattgttatgtaaataaaaaactgggcttttggtctacctgatgtgaactagcagaaagcagtagcagatcctttttagaattttctctagtgagagctctggagaacaaaaacatctctgcaagaatttttcttaattttccaacttggtaggaagataaaataatttttttatagcagtttttctgactatggtcagaaaacccatgagctatccagatagcttttagaatttttcctagcagagagaactgtctcaaccagagtttttagaatagtgagaaaaggctgtccagagcagagcagagcacatacacactcatacacacacacacacacacacacacacacacacacacacacacacacacacacactaactctcacacactcacacactcagactgagagatcgagcagtctggaaagccatctcagcaaaacctaggctgccagcttggacccacaattagacttcgagttgttcttttcgctgctctcagacactacttctctcagaacccctctctgccaaggctagtccctggcagtagatcattgagctggcctcagattgagattgcgtccactttctgagcactgggattaaaggcgtgtccaccatgcccagcctatattttctgtattggtttactgtaatgattataaatcattacataaaaattcggcctgcatgaagtcctgagtttgattaccttttgattactactactgcattataaagctggatgtggtggcacatacctataataccagcacttgagagttggagatggagggatcagaagtttaaagtcttctttggctacaaagagttcaaagccaacctggatttggtgagactctgcctcagaaaacaaaacaaaaggccagggacagtggtatataacctcagtgccagcactgcgggctgaggcaagttcgatgtggtcctgatctgggtagtgcagtccttttcagccttcctaatgctgtgaccctttattacagttcctcgaattatggtgaccccgaccataaaataattttgttgctactctataactgtaattttgctactgttatgaattgtaatataaatatctgttttctggaggtcttaggtga

SEQ ID NO: 35277 - DNA, 1154 bp, Mus musculus
aggatccaacaccctcttctgacttctgtaggccctgcatgcaagtgatacttagtatatgtaaatatatgcaaaaaacccactgagttttgtgtgtgtgtgtgtgtatagatagatagatgaatgacaagaaattacttgacactaaacaattaaattcatgcattatctctgcattttgaatgtttagtatgttaaaattacatgtacttatttttaaatagggagcatttagtggctggaaagctattttacgtgttgatcggccccgagaagctgggttcaaacgccttcttcaggcaggaggagcaaaggtttgtcctgaattaatttactgctatcctaggggcaggtttgcaccaacttgtccagcaaggtttctgtgatgtctccctgccctctgcctttgaggggaggagcatctgctatggagcatgaggggattaacccttcctgtttttcattaggtgttatctggtcatccagaacctttacttaaagatgctacgcatctcttttgtgacttcaataaactgaaacctgatgactgcagagttttcatcgcagaggctactgcccagaacatggtctgcttgaaaacagaatatatcgctgattatctcatgctggtttgtcacattctactcttccgtttatcattatcatttttattacttgtgtgtatatgtggggtggggagttggcacatgtgtgctcgtcagaggatagcttaatggagttggttctctcctaccatgtaggttcaaacttaggttgccaggctggtagcaagcgcctttacttgctgagtcattttgctggccccatacttccttatttctagagatatgtgtatgtttgtagatgaacatccacacatttactcttggcttgctgctaatagaattgacagtctgccattctctagtctttcagtttagttccatttctatattggatgcctgtaaactttttagcatgaaatttaagtatgacaggtttatgaaaatctgggtagctatagatgttttacaagttctttaaaatattgggctataaagaaagcagggggctagagagttggctcagagacaagagaactggctgccattgaaatcagactcagttcctacctaacagtaacagacctaccg

SEQ ID NO: 35278 - DNA, 1234 bp, Mus musculus
tagaaaaatggctgcaaaggtagccattgcaaggacttggtgtcaggtagaaacacttaaatgtccttgctacctgatagttaagcccattgcacatttgtaaatgggtgtaaaaacacttatagtaattcacactactagctactgaccagcctttccccaatttaatctatattttaatccatggaatcattaaaatctgaactagccatgctttacctgaactttgacccactggcaagctttgaggggaaaaagaaacctggagacatacatgcactacaaatttgaagttttcctcttcccattccaggaatcccctccttgtgcagacaattaccgtgtatccgaagctgctttattccataataagaaaggtgggcctggattaccacagaagaggaaaactcctgcagagaatgtagtcaaacggcctcgagtacactgaagtgagccatacacaaccacccaacgaatgtttttgagtttagtgtgcttgcctaaaatgtataaagtgcactagaaaattttcagctacaacctgaacattgctgtgatgcatttgtgtagcagtttaaaggcatacatctgaaggactatgcttcagattctaatgatcctgtaaactggatacctttaacctgaatttgaatcactggttattgactgttcctaatgaggctgaaatagttttaacaaggagatttgtttcaaaaatgtcatagttcataaaagcaaaagttatacattagggttatttcatgttttcctgatttttatatatgtattcttgccatttaacctctttaacagcctgagcagagagtttaacaatgaagctggggctctaaacttaaaatatgtatatatgtaaatgtgtgtatgtataaacttctatcatttgccaaacttgggcaccaaaactttgagataaagaataaaaaaaaatagcaacttaaactgtattgatttgttcatttagatctgttgatatgccagacttaaaagctgtctcaaaatacactcacgcacctcacctgcaatcccagcactcaggtattgaagtagggtcattgagtccagcctagcctgggttggaatgagacgctccattaagcaaaggactaaagaggcatcagttggagacagtggtggcatatgctacacagagaaaccttcttgtcggggtgggttggtggaaaaagcaacccttagaaggtgtctcacaattgcc

SEQ ID NO: 35279 - DNA, 2568 bp, Mus musculus
ttcttttcccttagggataaagaaatggagaagagctttgaagtagtaagacacaaaaatagagatagggaggaggtttcaaaaaaccaggcccttaaacttcagctagacaaccagtatgctgtgcttgagaatcagaagtacagccacacacagtacagctaaggaatggtctttgctaagccttccaaggtaactagaccacagctaaccaccaagaacagccattcatcgttttgatttctggatctacagtgactgactgaagacctcaagtccagtgactgtccctgttgcactatggaagttcaagagtcacgactgatcttgatgtgtgttggatttaggggtgtttcattgtcttaaatatttgtgaattagattcaacagtgtttccatagttgctctgcgtataaaaccaaacctgcagccagtggtcattcaaacatctttatgttcagatactgagccttcgcaaggttgactacctcagatttgctgcccttagttgtggatttcatgtggatcacatcttctacataaggttacagctactagtgtctgtgtgaaccttgaaaccaactctactggattcctgtcagaaagccttcagaagtcagccatctgggttctgagccgctgtaaaagatgaagagttaagtgaccttaattaacctgttctgtgccccatcctaaggcatactctgtaggctgtggctgtgttagactccctggaacaagccgctgtcagaaatgatgtgtttggatcatctgtgtggggcttatgatttataatttaagtttttagttttatgcggtaactggatttaattcaaccaaactctggtccaccaaatggggagtgggtgggggggtagtcttatttctttgaataatttttcattcagatagtgcttgttcggttccacattaaggccttgctttgactcagagtaagttctttaagggcatattgtctgaaatatgtctgaaagaagcattggaattgtaaaatgccctatgaatttgccaatccttaggtggaaccagatagcctttgatgcatataaaggacagcggatccgctgcactccaggtgctgctcaagcctcctaatcaggtctaattgaactgctgtggacagagtgtggcgtctgctcactgctgtggacagagtgtgacgtctgctcaggaggagagggtttcactgacctggcttttaacagttcaaagcaacaggagcaaaacacccaagttgcgcatgaatctggcatggtgtctgataaatccttgtgtgtgccccaaatgtgaaggttatgggctattcattgtttagccagctcttgacattcaccttgggagtatgtttggtaatcacttggagacgcaggggaatagtcagtaatgtagcatttctgttgtaatttcaatttaactatctagtagtacttggctcttagaagaggtttctgctaaatttctttctacctaatgaaatagcctgtcagttacctaccttgtcactacagatggttcagtacacatactctatgttggcatatgactatgtgatacaatactagtgcctgggtttctctctgtaaacgaatccctttgccaaacacaggtcagacttgctcactactgacaggagtggaacaggaaatggatgttttcccagcttgagagcatgtttagtggatttagggcagcagtgtaggaagcaggaggtggaggccagtgtcacctgaccagactgtatgccacttcagagcaataatgttggcatgatctgaaccagccaggaggaggttgagtgattagaggcttgagattcttagttgaactgaagacttcatttgggcaccagaaacgttaacaccttgagccacaaacttcccttaaagtatgcttcactccagcgtgacacacaaacacagattctgtttggggttatggtttaagacgtgaacagaaacatgatgaggtttgtttaatggcatactgtactggaacgctgaagaactgcagcagatgtaaattccaagtcttgttattttttaagattgtgaaattatcaaaatgcatatgaatcaagttttaatacactgtctgggtggatgaggctgtccattgcaccatttctttctttgggttctcaggcatggttctgacagtgtaagaactctgtaacatttaacattgaataaacagtaaaccaatggatggtggaatgtgatgctttctgttgaaaccccttagcctaaactctagggaatggagaacagtgtgcagtccatttgtggagatgaccctgctctccaagagtgcatttagtaatgtttgccacattctgtagatattaaatggcatgagtgaaaatggctgcaatttagagacactccttatgaaaaagtgttaaacgtattctgggccacctctgggctccttatacaaaatattaatttttagggttttggttccccccccccaccccctttcaaatgtgaatgagtgttttgcctttgtacatgtcagaagtgctggaggccaaagaaattactggaa

SEQ ID NO: 35280 - DNA, 1217 bp, Mus musculus
gtgacatcacattcattgggagatttctatttcctttcatgtctctgaagtgtagtgttttatttttagatagtcctagcccagagggcaacccaaagacaatgctatttcaagggatttttatgtaaagtaatgcatattttcttaaagtacatcttatgcagcttgctgagagactttgaaagggaaaggacagttgggtaattttggggagacataaaagtggggttttttctgtgttgatggtattgctcctttctgcatgaaatgtaaaaggaatatatagtttatctttagaaatcctgggagaatataaaaaggactatacaaccatcagtcctggagcaccctgctcctggtgagaatggagctgagaccctccatagctgccacaggcaaacctcttcctgtggttcttgggaacagagaagagccaagttcccctttagccagaagcctgtgttaccggtatacctcagcttaccttatcgtcatagagagtaaggctattacatcaactgtcaaccctttcctggaagaaaaaaaaaatcctgatcaggaacatcttatctaggtaaaaagcaaagcaaagagcgtcgggagccacgtgacccagctgcagctttgcccatctggattgactgtatgccaccttgccttgctgaagtggtgtggtcctgaggagttcctctttattcttgactctctttttgcatatgttcctagttttctgtgggaatagaaagcagtctaatagatgtctcacttctcttacacccaaggagtagcttcttggtatgtttgtgtgcgcgcgcgcgcgtgtgtgtgtgtgtgtgtgtgtgtgtgtgtgtgtgtgtgcacgtgtgcgcacgatctgcaggcaggcatctcccctgaaataagaaatgacatgaactgtcaagaccacaatacagacaaacaagaacggcaggtggaagtgatctttgctggaagatggaggctcgttcctgagcaactgttcgctcctggagacactctgggacaggtaatagaggttataacaatcatacttgtttccataatgatgacagctagcatttgatcatgcttgttacatactatgcacagcttcagatactttcagtagagataagcctattggttctcatagcaacccagtgaggaacaagaacttggggctcaagaaggtggtgagaggtcatagaggatgaagg

SEQ ID NO: 35281 - DNA, 1206 bp, Mus musculus
attaaaaaatccactcagtaggagtgccgagaatattgaagttgctgcctcctgaacaacattttggtgggtaatataaagaactttatgtctcctacatactttcaaatatatttatcagagaactctggtttctcagcaagctgcgcatgggtaaaggcggctgcgaggacaggcagttttgggtggttctgtttcatggcacttcccccttttgttgacagacggaggattcggcttctgaagtaacagtggaagactccggcgaaagcttggaagatcttatggccaggatgaagaatatgtagacagtggctggcttctgtcttattttctctgcttatgctagtcccttggaattgaacaatcggaactaataaaacttagcgccgccttagttggcatgtgtatcttcacggagttgttatgctgtgtggaactagtggtttcctcctgcttccgtatacaacctaatcagtaccacagcgacagaaagagaaggggtggaccatcccatccgtgtctgtggcctacggctctggacgataaatagcacaaatggaggatggactgactgtgtggcctggtggctgtggctgacaggtgtctgagtgaatggcttcctactggacagttactcactactactctgaccaggagtgactttaaacagcctatagaataaaaacatcaatgtaaatgagctaaatacctaataaaaaatggaaaaaaaaaaaagaaaagaataaaaacatgcctcagataattctggatgaaattgaagcagaatgtcttcattggtagtgtataaacccatggattgaatatttaagatgaagcatagataaaagcaagctatgttcacggcagacagaattacgttcaggaaacattggttatcctcagattttcatcgatcaaggaaaaggcatcgctctctgtagcggaagtgtctggtcaccatgttactgaagaacagacaccgtccatactttgtgcatcatagagtgttcctccatacttgattccataaatactgacatgctagcaaggcttgtctgagtggtgggcaaaacaactcaaacctgcctctgcagaggtgcacaggtatttattccctgcaagggctccatttcccaagtgtgaccacttcaattgtaaaccgaggcctgatgtgaactattggtggtttaaccttgaagatag

SEQ ID NO: 35282 - DNA, 1176 bp, Mus musculus
taatgattgagttttggtgattgtttcctttgatggagcctgtctatacatatcactgttagctgaaagattgcaagcttaggctggagagcactggctgctcttcacaggacccaggtttgatccccagcaccgacgtggcagttcatgcataactctagtcccaggtgatctgccacccgcctctggcctctgtagccactgcatatgtatacctgcagtactgcatgtatatacctgcaactcacccatccgcatgaaaataaagatgaataacaagaatgcaaatgctctaaatttgttttgttttcctttaagccgtctgatggcattgaaacggatgggaattgtcagtgactataaggtatgatgaccttgatttcgggaaatgagactaatttctagtgacaaatctaacagtattaacaggtaccgttttgtgtttcacagaaaatccgtacctacgctgtagcaatagtaggtgttggtggagttggtagtgtgactgctgaaatgctgacaagatgtggcattggtaaggtaaaaagatttctctttgcctgtccagtaggaaactgttcactccgggagcaaatcaggtacagagtagcactctattgcctaatcagtggttatggtttctgttatatttgggtagcttgctcttctctagaggccgagtcataactttctccagacaaaggctcatattattactaattcaacaaagggtacttaattgtgtccagaaactttggtttagggcagtgtaatgtgtaagtaatttggaattattttagatatagaatctgttagaaatggttctggggtcactcccaaaataccacgttatctgtagcattttagcaaggcacaaagtttacttctgcaggagggtgcatagccacgccaagtcaagcaggcaagctcacacagtggggattctgttgggtttttactcctgatgtaagggctcccgtgccccactgtgagtggtcagagttcagcctcacactctgcacagttagctaactcaaaatggcacagctgatgggtgaagtacaacttttgggaccaggatcgagcctggagcacatattctgatttcaggaagtgctgcccctggaggagcttaagtttctgtcacgtcgtctttacagattttattattattat

SEQ ID NO: 35283 - DNA, 1147 bp, Mus musculus
tagaaccaagacccaggtctcagcagagccagcatcatatgtgtccagatcaagtcgacggccattccgtctttcctatctaggaggccatgagaaacaccagggtcttttaatgcaggctcaaggttctggcggactctcttcttgcacggaccgcacaggtcttccgctggcgcgtccttagtctagggtgacagctgtttgtcttcattcgccagagtcacgtttgcgaccttgtttttctataagactgaggactccagctctgacgctgagggtaaattctaagtctggtcccacaacaggcaattcttttatttctccaccagactccgagtcccagactccgcctcccacatggctttgcagcaacactgcccagagtcccggtgattggcttctcctaagccccgcccgaccacgcccccccccccccccccccaagtgccggtctcctttctgccttggcgcaacctccgtacagtctgtggattcctcggtgacaacagtggcggtcatggagacggatgtcaccagtgacaccgtggaagtgctaccccagcacaagttcgacctcaggtccctggaggcctacctgaatcagcacttgccgggctttgggtcagattcccgggctgtgctgactgttactcaatacaggtatcaaccatagcctttgcctcctgggaacatgtctgtgcttggtgcttcgcttcctttggccctgggtgggtgtctcatttgcccggtcgggatttctttccctgcaaggatgcttcctggataatttgtactcgaatcccaggctagtctgaattagagggcaggagcagaggtgcagtatccattatgcagtgcagtcttgttaaggactaaaattatgtgtctaattcaccgagagtgttgcggctgaacactcttgaattcctaatagatatcttctgtgaccttctgtgctacaatctaaagatcagtttctgaggggctggtgccattttgtttaattgaccttagtcacctggggctaggttaataataccagctaaaatataccaattcgattctagacattccacttcactgtttttagcaccacttaaggcctaagttcttgaagcaagggaattaaacgggaggaggtgactcc

SEQ ID NO: 35284 - DNA, 1211 bp, Mus musculus
gggaaatcccctatttctacaccagtgttactgcatgaattttaaaattattctaattgtgtcaaatactaaaagccatgaacataggtgctgtatcgctgcctgttgagacagttacacatgtagatcgtatttagagcttcccagtggtctgtactgggtgctggtccctgagactgatagaaaaaatgcctgctttcctttctctcttgcaggacctggagttgctggctaccttacagcaggtacatcctcatcagccatgtctaatctgccgcctcccgtagaccatgaggcaggagaccttggctatcagacttgaagcactcagacagtaaatgctggaaggccagtactgcgcccacattcctccaaccaacatgttgaaacagactccgctgcctttctcctggtttcatgacagtgttattcctttttctataaatagacttttatttaggagaagagtccatgattctgacgtatcacgttctgagaaagcactctgtgggtcagccacctgggtacacaagaatttcttcttcttgatgtatgtaagcacattttgttcctttatatctgtttacaagactgtgaatcaaaaagacaaactttcttcctagtttttataacttttttttgaattactgtgactgtgggattaagctgcagtctacaaacattgggctaaatcttatcccagagcagggcgcctctctctcctgcaccaggtctccatgaccgtcttcctctcatcgtccctccacccgtgaccagatcctcaatcattaactctgagagctcggtgcacatcggtgtgtatgacaggcgtcaccaaactgaacgacaaggagcttgtgcaaaaaaattaaaactaaaaatggatgtgaagatgttatgtaagagattagtgtaattgtgaaatgttctatacattatcaaatatataaagctttctatattgaatgtacattatacagatcattcatatgtgtacataaaattttaaaaataaagggaattgactgctttgttaatgagatatgtatgttctgtaattttagcctttggaaacttcttccatgttcacttttgggggagatggaacagaagcagacaaacacccctcaccctcacacgcacagctgtgcccacctccgttcactcactggaaacagcagcttagttacttcttaaatcgtgtttaggtg

SEQ ID NO: 35285 - DNA, 1174 bp, Mus musculus
taaaggcatgcgccaccacgcctggctaaaataaatatttattactgcttcatttatgtagcatagcctgtactttattcttacaagttgaatatctgatatttcaatatttcggcctgttgtcactctccaaggagcattgttcttgtctgaatctcagccaaggcttgttagcgtctcctcgtagtgagtgcttcattcctttggcctcttgcctgtcattcccacttgactatgaacatccgtgcatcagtggttgaggggggcaggctgtgtccagaagtgcagctctgagttgcaggtgtttctctctcctaagacaggagaaatcttaggtgtcttaatagggtgtcctctggatgttaggaagtagtgattggggccgtgcagggaacagaggtaggaagaccgtgtagcctagtggtcatgagtgtggacctgagagggaagcagacataggtaggaaaccagctagagcaccacctcactatgagaccctgggctgggtggactgggcctcagtttgctcacagcccagctgtattgcacttgccttgctggttaacgtgagggtgaagtgtaataatgtgacacagtgacacaggctgagcctgcactcactggtgctctgtacgtgtaagctgacagttgttgcatcccttgttgtgtcttttcctctgcaggccgtcagcttgtcctggagactctttatgctttggcatcaaatacaaagataatcaaagaagccatggcaaaaggtaacgtacacggctctttctcatccgtccagctcagtcttctccagagaagtagactgcgtgaaggtggcattagaggtctaaaaactcaacagctgcctaatcagtgtgatggtcctggttcccagctacacaggctgaggcaggaggctcgtttgagccaaggactttgggtcaaaatggacaacacagtgtgaccttatcgaaagtcagagatcaaaagtgtaagaagtaatgagttgaacttacatggcaagtgaatagaggctgtgctgatgagaaagtcactcagcatttgagcattgatctttttttttctttctttcataggagctttgatttatttattggatatgttctgcaattcaacacaccctcaggttcggtcccagacagctgaactttttgccaaaatg

SEQ ID NO: 35286 - DNA, 1234 bp, Mus musculus
catttgtgacctttacctagatagaatatttcagtgttcataaaatatttgtatacacatcattttgttttaatgctattctaaagatacctgctagttagaaattactagaaaatacatataacactctgtgttcatctgcagatctttaaaatcagattagattcaagccatacagttaatatttagaaatagtagtgcattaattaaagctgtatttgaagagtactgaccttcattaaactaaggtttaagttaatttgataaagcttgatagaacctttggggggactgtccacagacagtgtgttagacaacacaaagtttaatcaattaaataataaataagagtctttggctcttctagggtactgtttttcaaggaaatcttatggaaggaaatgaagtcatattaaacagccagtagatttaaaccaaatacctaatcatgttcccagctgtatgagagcttagtcttcatttacaaaagaggaaggtaacttgcttcatgcctggtagaatgccgtatgctctgagtacacactttccaggaaatacagtaaatgttgaccgtagaaaatattttctagggaccaggataatgccatcattcgtcctctgcccagagtgaaaagactgctgtcagatagcacctgccttccccatgtcatccaggtgggtcctcgtgtgctgctaagctagaacactaatgtaaaaatcatgtgatcatactgtagctcttagctttattataatccattccattttcatggagctgaaccccaagctacatttgtttcatttattcacttattcttattttcaagtcttgtttatttttagtgtgtttgggtgttgttcctgtgtatatgtttgtgtgccatgtgcatccctggacccctggaggccagaaaagcgtagcaggtcccctggattgggcttacacctggttgtgagctgcgttgtaggtgctgggaaccaaatccagatctcctacaagagcagtctatgttcttaactgtggagccatctctgtagccacagttctgcattctaaactaggtttttaatctgggtatactggaaatgaaatgtgtgatgtcttcttcagatcccagattcatccaaaagggattttatttagagtctattcttcaaagtcacatcactgtgggagctgcaatggtgctctcctttgtgctgcagaggatgcagcagcccacagataagggca

SEQ ID NO: 35287 - DNA, 1220 bp, Mus musculus
acgggggctgcttttctctaagatgagaaaactgggtttatagagggaaaggtttgctggttttcctgagtggtctgtcctggtgttccaggcgctagatggagcctagtcctttatgtttacagaaacagacaggaggtgctggaggtatgtatggctcagaggtagagtacttccccagtgtgtgtgcagcactgcataatttagaacatggaagagttctttaatgtaccattttatttctggttactggataacctgtttactggtgggcaggataattgtagggctagggtttatcatgccgctttgtctttattgggggaggaaagtgcttactcagactgtattaagtggacattcttacatgatctctttatgggataattttgtcttttgaatcctacaaatgccaagtaagtatggttgcatgccagcatgtctaaagaaattccacatgtgctcatcctagagagtgttctaggttacagtgccgattgaagagaaaggctttcaattatgcaaaaatgctttcctctttcagaaaaacgttaaggatctcatggactcaaacggcattagaattcttgtggacttgctaactcttgcacatctccatgtgagccgagcgacagtccccttgcaggtacgtttgctttctagcttctacaagttgtgttttctttggatacaattttagactcacaagattctttgaaatctgcacctgggtttgtgtttctccaatgaatacaatcgtgtgaatgctgggagattaatgcataccaaaaaaaaaaaaaaaaaggaattattaccatcagaatcagttttattacttgataacatttgtcttttatgataaggtaactgtatcgctaaaaagtggcttggttttaatacaacgtgacctttcagttaattattggatatgtaactagaatatcatcattgacaaacatcaagaatatgttttgccctaaggccattggggacattattcaaaccatacaacaggacaaagccaccaaggccttctctggtacttgatttaaagaaagatctatattttcgcctatttgatgttttatgtcttcagatatatttttctggttcaagatatttatgacaaaaagagccttttaaatattttagaatggggcattttggggtttgggtatgactaataaaaatcacaacacttgttaaacaccattgcagta

SEQ ID NO: 35288 - DNA, 1227 bp, Mus musculus
cgttgaaaggtaggttccttttcaggtctatcatgcacaccagattcggtggtttcggtgagttccggggaaagctagagccctgcctgcactagccggctcgctcacctgattttgcttagctgctgttatcaccggttttctggctcctctatctaagcagctcattcctaagagctttttcacagttagcacctctggcaaactggtcaccgtggtgatgggtgccctaatttggctttcagagacaacttaggttgcacagaccttctaacgttagaaaccagaacatcgctcagagccaacactcagagccagagctaatgctgctattctctgagcatgcgccctaggaaaagcagtaagatttgactgcgcacagatcacaactacttcgctttcccagcctttgatcgcctttacccacactccagaccaccctgtttctttaacctataagtacccctacaccgtttcccccccagaggcagatctgaggctctctgccccaccttcataagcgacctcttcaagaaggtactatcagtatcagttcccacatggtctagcggttaggattcctggttttcacccaggcggcccgggttcgactcccggtgtgggaacacaagatctttagctggctgctgaggaggtgtgagttctttagtctgagtggaatgtatacaaactctacaatgagccttgaaggaaggaaacacttgaaagtatggaagtatgtatggtttacaaaattaaaggggaaaaaaaagagcccgcacactacagcaaaagactcagtcttgcaaaatccagtttattattgtaatttattattattcacttgtagcgcttttgtactgcacatgtattagtattcgtagtgtttgggattgaacgcaggaccccacacttgctaggtaagcactccaaccctgacctgcatcctggctttctttaattttttatgttgagacagtgtctcgctaagttgcccaagctgaactctgtaacacgagcaagccttaactcaccatcgtccggcctcagaatctggaatagctagatttacaagcctgtgccacccagtaaaactcttccggaattgaaggcaggctctaccggctgcagccaatcacgtgctcagcagcaaggcttgctttcagcttctgctccgagggtggctggccgccttataaccctgctggcaacccttattaacccgcc

SEQ ID NO: 35289 - DNA, 1271 bp, Mus musculus
gtgttaactgtatttagtgtcagacctttatgtttgaaagataaatatgcatacaaaagatacttgacatgtacttctaaactatccatcctattggacagttaaatacatacttacaggtcacagtaaagtacacagtggtcagcagtggctttattctcaggggctagctgattcagttgaggaaaaacaattaaccaaaattcctagaatacaaagaaatacagcagaagagctgttcgcctctgtgtggagtggctgcattcatgctcagacgtgtagagcggagactctttgtcggaggtccctttacaggccagcattggtagcacatatgaatgagaggtttttccttattctctcagatcaaagactctacactgcctgcatacaaggattcctgcaagaacctgcctttccccacctactttcctgatggagatgaagaagaacttccagaagatttgtttgacgagagcgtgtggcagcccagtgaaccttccatcacctttgcctgatgcccgggtgtggcaggactctgtgcttcgtgcactttgatgaaccagatcaggaatgggaatcgcattcccgcggcttagtcatgagagcatgctcttgtttttatcaaaggacacaaatgagtcactgagccctcccttcagcctggttagcaaggttactgcattaaacaaacagtcgcatagactgagtttgttaaaattaacaatttgtgaagatcaagacgcctgtcatttataggtgtcattctttagacatatttcccagtctaggtttgcgtttgtttttataaacttttattaaagatttatctctcaatgtctggttgtgaaacagaacctggaggaactacattgctgcctgttggataaaagaaaccatttcttaaaaatataacattcttttagagtttagaaacttaatgggaggaggacttttttaaatctaaattatagaaacctacgtgttaaaatgaggacttagtggatacagagcccagcatagcctgctgtctgtggagcagccactgctgggctctgctgctgagcatggggggacatatgggcaattcacttctcagaacttggctcctgacttgagcgtgagcctgacatgccacttctgttttctcttgaaatcagggatcatattgtaaccaaactgcattccaattagccatttgtaccaacactggtgcaggttattaactgtaaaatggggctagtactgagccttgagtaattgtgtaagcc

SEQ ID NO: 35290 - DNA, 1952 bp, Mus musculus
tcgcccttgaggctttcatcttggagccaccttgcttttcccttatttccacatttttaacttatgggaatgattgatccctacctcctgaaatagttgtggaacagtgtattctaaggtgtaagatgttgctctacatttcaaagtcttgtaaaactcttttttttctctttcagatctgttgtttcttttgggccttacctcgtcagtgtgcattgtgtctgagattataaagaaggttgaaaggagccgggagaaggtccagaagaatgctggttcagcatcatcgtctttccttgaagtatgatgcatattgcatttttttttaatttgcaaactaggaattgcagtctgagaatcatttagaagggcaagttcaagaagataatgaagacttaaggacttttttaactttccattgactaaaaatgaccattaatgttaaagacttgatttgaactttgttggtagtcccaaatgaaattatgcaactttgaataacacattccttgatttgaattggcttttgcaattgagtgaacttcaacatatgggcaagtactgaattaaaaaatacaaaaggcaaaacctgaaccaccttctgcacttaaagaattctaatgtacaaatacactgtctgtcttagatggatataaatattttttttatttttaaatattgtactatttatggttgtggggctttcttactaacacacaaataaactcaatcatttaaaggcattctatttggtttagaaattgccaggggtgccgtatttcagctaccgtgcttcctttttcctgaaatgtaagcaactgataccttgtgctaccatttttatatttcaagttgttttttttttttttttgcacaggatgtgaccactgtctaatcactgttcttttctttctttttgtgactgaaaagcatatactgcaattgaagtaaatgtttgctcttcttagtaagtgtaaatggttgttttttggtttttttgtagttttgttttgcatagaggaacgagtctttgatctagcagaattattagttcagggctgttattggcattacagttagagtaattgtagttaacacacagccatagagtcaaaaacaaggctgggttggaatttaaaacattatattaacatgtccatgtttagtttaatactgctttgtcggtatcattttgtcatttcttctttataaatcaaacacttcagctgaataattgacctttattactgtttcatatctgtatttttaagtctatttcttagagagtatagactagtatacttacaaaatagaaaagtcccaaactcagagagatagcatatgaaccagggtgtacattggaagatcctgtgctggccgcctcctccgaatcctctaggcagctgctttgacctagattgtagcacaaccctgagtctgtcccttctaccatttgttgtactgtcttctacttcattcagtatgcttgggaaatagatgagtttgttttgtgcaacaccatctgtttttataaaagctcgataaaataaaaggtaagtgttttgtattttataacctgtcaggattaataactgttcctaagcttgttcaatattactggtgactgtcaacactggtgtgctgtcattgataggagagttctgttgtttgtgtctgtactactgaagcacgagcataaggggccaggtgtctgcactttgttctttattctttctggctcaactgtcaagtgtacattgttctgtctgattaggtggaacgtgaaatcattgtctgaccaactcttagaggtttgatgtctcatagcaaagttttataatggttttttacattctgttccagacttgaaaactacatattaagtgcatattcagtcttgtttattatacagtagaggttgagaatatgactcatgaaatgaatgtgcctat

SEQ ID NO: 35291 - DNA, 1154 bp, Mus musculus
tcatggccatcacagcaaatctcctaatcaaagacatccttgcatgaaatgtgttttttgtcttggtaggttaggaattttagaaatcaattcatatgtaaatgaaactttttgaaagttagctagcaagttctcgacttaccttgccaaatgtatagatgtggaaagcggcaaatcagtagtctctattgccctcacttcttgcctccctctccctctccctcctctccgtcccccatttccttcttcctgctagttggtactagagacatctgccatcatgtctagcagtggtaattttcaagtaatcataggcagtgatttttttatgatccaacatcttgttttcaaaagaaagcatataattccctagctaatagatgctagttaggttataaaagtagtgtaaagaacattgcaaggtactttgttctctttgtttttaagccttggagtagagccagtggataaagatgtcattcgaaaaccgcctcgaaactggaaggacagcattttgacaaaaaacttgatacttaaaatacttgtttcatcaataatcattgtttgtgggactttgtttgtcttctggcgagaggtatgttcactggataaactgctgtgttaccatgcatctgtgtagtcagattcctagtaattttggtgtacagatgattgacaagtgaagaaccctctgagtgaaaagcacaggctgagagaatacaacgtaagtcagtaagcctttagtaaagtaccgtgtacatgcaagtttgagcagagtaaggaaatctaagtccttgcatagcagtgttctcattagatttttttttttttaactttcatgcagactgtttgttcactaggtggtctgtagaaaattcagatgggtttcatgtttagaatgaagctatttcattttaaaagcttgcagtgttatccattctattcagccaccaagaaacaaacaaacagtcattttgtctttcttcttggcagcttcgagacaatgtgataacaccccgagacacaaccatgactttcacttgctttgtgttttttgacatgttcaatgcactgagttccagatctcaggtatgcttaaatgctcttatttacctctttgagaagaataacctttcctaggaagcaggtggaaa

SEQ ID NO: 35292 - DNA, 1141 bp, Mus musculus
cctgggtgctgcgactagagctcaggtcttctgcaggagcagtgggttctgggtactgagccattgcgtcagccctatcagggattgtggtttttaaagaggatttgaatattgtataatgaaaatagtttaaatagagctcaattttctggtaaattaaaatatttcaatgtttcttaatcttacctaacaatagaaatttttttgtaagtgctaattattatttgattggaaactaagtttcaagatgtataggcatattttatgtgatattttcttatttgcttatttttaaatttcaggtctgcaatagaagagggtaaaggcatttataataacattaaaaattttgttagatttcaactgagcacgtaagtttgcaagaactttttacccatgggtcttctagagaaattatttgaacagtaaaattatgacctctatttgtgaaaattacttactagtagttttctaaaaagtaaaaggctattaacatactgtttaggtcatactagatattataatcatgtagggatgatttaaaatatataataaatatataaacaataggtagatattttgacattctatattaagtgactaggactttgacatttgaagggatcctgcaaacaattctcttggtaactgagggatacctgcataaacttctggggtttatttaattgcccctgaaattaaaagaggatgtgtcacatctcagtaatgcttcttggttatctttttctcaaataggatagattttatatacccaaaaagtggttaaatatttttgaaagtgttgctctgtaggtttaaaaacctttcatcggggcttgatggcacatgtctccaatcccagtgtagaagactgaggtagaagaggccagaggcccagcctgtcttccttagagagggcctctctcagggttggaaggtcttaactacttttgctgttgttgcctaagcattaaaaacaagctttgttgttgttgttgttgttgttaaatacttgtagcttgctaatcagggtgactttcacttttgatcccaacacctgggagactgagtagattgttgtgccaatccagtctacattagggagaccctgggctgcagcattagactcactttcaaaaaa

SEQ ID NO: 35293 - DNA, 1424 bp, Mus musculus
aagaatcagctatgattaaccagataccagaactactaaagtaaagcctttgcattactggaactattgatgctggttagctggagctaagaaattagtggtgattaagaagagaccagcatcactgaggtgaaatcttctgggaagtattttctgaaagcacagaggctgtgtttcagagatagccaaggctgtaccttgtgctgtggatggacttaataatgtgtaagagctcttttcctctggcgcgccaccgacgatcctattgtcatcatgggccgccgccccgcccggtgttaccggtattgtaagaacaagccatacccaaagtctcgtttctgccgtggtgtccctgatgcgaagatccgaatctttgatttgggacggaagaaagcaaaagttgatgaattcccactttgtggccatatggtgtcagatgaatatgagcaactctcttctgaagcactagaggctgcccgtatttgtgccaacaaatacatggtaaagagttgcggcaaggatggctttcatatccgagtgaggctccaccctttccatgtcatccgtatcaacaagatgttgtcctgtgctggggctaacaggctccagacagggatgcgtggtgcctttgggaagccccagggcacagtggccagggttcacattggccaggtcatcacgtctatccgagccaagttgcagaataaggaacatgtgattgaggctctgcgaagagccaagttcaagttccctggccgccagaagatccacatctcaaagaagtggggcttcaccaagtttaatgcagatgaatttgaagacatgattgctgagaagcggctcattcctgatggctgtggtgtcaaatatatccccaatcgtggttctctggacaagtggagagccctgcattcctgaaggcttcaatagttctctcctataccctaccaaatcgttcaataataaatttcgcatcaagttcgcttaaaaaaatactaataatgtgtaagagtcacccaggtggtactggttttgaaggcatgaaggggtcatgcagagcagctgaggctcggcactgtgagaggccatggaaggccattggtgaaggcgcagcctcagttgcaattgacggcccaggactgaaagggtcatgcagtgttttggagatgccaagtactatgagatgaccaccaagagcagcagcagtggagtacaggcatgtggagcctaaaggacaacgtgtgtgctacaaagagcatggctggagaagtgacccaagcacttggaggagcccagaagatcgtgagttggatactagacattggacggttggagattgatttttgcttttgactgtgactgtgccctgatatttttccctcttgaaggaagtttgttagtgaagcccacagttaagagacttt

SEQ ID NO: 35294 - DNA, 1197 bp, Mus musculus
agtctgggtgttttgcttcttttgttttgttttgttttggtacagggtctctctaagtagccctggcttctccggaacttgctctaaaaaccaggctggccttttctgcctcttgagtgctgggacgaaaggcatgtgccaccatgcccagctgacatctgggtcatatggcctggggcagtgtgggacccacacatgttatttatgtacatagctaccctcttgagtgaagtgatctgtccccatggtatagctgagaagttgaaagctctgtgaagtccatccattgcctgggtcactctaatgtcaggctggagttttgcaactttctggcttagaaagtggccttcaagctgtttgtctaggctaggatggtcacaccccatgcctctaaatcagcagtcaaggtttttctgaggaataagtgactgctatgtctctcagaaactgaaaagagccccgaggtagagtctttttgaagctgtttgagcagtacttaattgctaccctggtatcttagtcagtcctatgtcatggtccagtagacccctctggatggcctagccaggggactgttgattagttcttatgagtgccctgaagttcgtagttgaggattgtagctagaaagtgaggtgatattgtatctctcagccacagtttaagatccttttgctttttctcagggtggcgtcctaaagggctgctagttgcacatcttcatgagcacaaatctgctgtgaatcgcatcagagtctctgatgaacacttactttttgcaacatgttcaaatgatggcacagtgaagatctggaacagccagaagatggaggggaagaccaccacaacgcggtaaggtggtgacgggccagccaatccagctacgtcagcagtgcttgcagaatgctctctctgtatcagagctgcttagggctgtgcggaccagaggctggccatctggggggacgtgagacagcagaagctgtaaatgagtgaagtattgaaacaatcctgttagatggcaggggctggggaacatgggtgggggctggagtgtctataagacactgccttacagagaaacatggattcaaagaatgaattgcaagaagggagaaagagccacacaggaatgttgaatgttctgggcagtgtcctggggcgagtggggtggggtggggacctgacagaaagttt

SEQ ID NO: 35295 - DNA, 1172 bp, Mus musculus
ctctccgccaggtcctgcggcctcagagacaccagcgtctccccggggcttgagagcacccacaaaggcactagccccgaggcgacctcaagtcctgccctcgagagagagggtttagatgctccacgcccgcaggttcacaccccagaaccgcgggctccagctccggggcctcagcaacgggaggccgccccgctgacgtcatcgtcccgccccccctcccccagctcgcgcctccgttccctccccgccccctttcccggcgtccgccgcgacacaagctcctcgccctctgattttgcttctcccttcaagatggcggacacaatgagccggcggagcgccggttggccctgaattgactccggagaagaacggtcagcgaggtcccgtcgtccgggcgagagagcgtcgcctgaggaagaggacgcggcagccccactgtcagccgtccttcggttcgtctccagcgcggcgcccgcaccgccggggttggccctgagcagcccgcccgatcgctcgcctctcggccccgccccggccctgcgccgccgctgccttcagcagcagcagccgccgccgccatgaagctgaccgacagcgtgctccggagcttccgcgtcgccaaggtgttccgcgagaactcagacaagatcaactgctttgactttagtcccaatggcgagacggtcatctctagcagcgatgatgactccatcgtgctctatgactgccaggagggcaagtgagtgtgatagtggccgagttccaagtgcccctctccttccctctgtcgctggtccccgactgagcccccacccccaaccccaggcatgtggtgcaggcgctcttgccagggccacctccatcccgcagtgctgcaggagatcctctttaagatgatgatggttcttagttcatgtgtctttgctctcttccgagcgcgcttttcccgcttgccaaaccccaccttgaccttgacctttaaacgccatgtccctgcaccctgcagccggacggatagccctttccactcccctggcgactgtcagaatgtgcgggtggactctgagctcgatgcagaacggcaggagctgtgttctgtccatcagtggcgtccagctctctgccttcacagcagtgacctggattcagccctggcacggtgcccg

SEQ ID NO: 35296 - DNA, 1209 bp, Mus musculus
tctccctctcggttaagagagacgacagtggtttcattttgggatcccagagtcttgttaggtggcagcaaacccttttcctagttggctactgcttgatacgcagatatcctactccagagcagactgcagtaacgtggcgtagtgcttgaaaaggaaggttgcctagagccttagcctcaaggaatttgtttctcttggaactctgtaatgttgtagatacggtgattggaacgtaaggtgacttttttacattttagtcagagttttgtttgtttactttttaaccttttgtaggtaggctgggtacagttcctatccctttcttagttttaactagaaaaagtcagtgattaaggaatgggctccttcatttattaactcgctgtctgtcctcttctctcatagggcctcatgcatctacagggcaaacctgtctgttcctttgatccagaagggttaatttttgctgcgggcgtcaactcagaaatggtcaaactttatgaccttcgttcttttgataaggtaaatctttgaatcccttgagctatcttggggttgcagaaaatttaaggacaacttggacatttgagaaccctttctgggctgggcatggtggcacacacctttatccccacattccagggcagatgcaggtggatctccctgagttccaggccagccaatgctccacattgtgagagctgtctacaaagactgccttcctgtggtgccaaggcaaacggcagctaacagagcagcagtgactcaccctctgctgtccactcgggaagaatcatgatgcgtaggatagacaataaggaaaaaatgtaaaggctagaaaaggagctctaatagaggaaggactgatgtgtgtgaagtgtggggactgctatttttctgttttgcagggaccatttgcaacatttaagatgcagtatgataggacctgtgagtggacaggacttaagttcagcaatgatggcaaattgatactcatctccaccaacggcagctttatccgactgattgacgcattcaagggtgtggtgatgcacacatttggggtgagctgactgcttttgaatgatggctgtttctttgctcataaggcctgggccaggaatgctgtttgctggatggtagaaaccaatagttacactcagtgatgaggtatggacttaagagtttcttggacatgaattttac

SEQ ID NO: 35297 - DNA, 2624 bp, Mus musculus
cttgaaccccttcaattttgaatgtactcgctgctgaggagccagtgaagtccccactttctgcacatccttctcaccccagaaatgcatgggaagccgcggttctggttttgagatgctagggcagctcagcaccccttgccctcactctgcatgtcttgttactgggtctccctgtgtaattaattgtggcattattccacaaccatcatgtttcttaggtgccaaacatttacaaaaataagtcttcatataccttggggtcaaagaaagaaacaggtacagaaggaccttgtttgtcaggaggctatatggtattctcttttttttttttttttggtattcttgtataggtgggtggggcagatcttgggcttagatgttgactaacaaaaggcccaagagtctgaaagggagggaagggggtagcaggtaaattctgagagctgagagatttagcagcttggtgcagttcccccatcaagatgatcccacagtctcctgtggggggtcctgctgagcttggcttgtacaaaagcaagcagtagtttatttttgtacctgagtcacatcacgttctcctgtgggccagtattgtggagcgagtctgagttgtttacactgatgccttccttccctgcccaccacaaattgtgtacatagtcaacagatgaaacccctcctcttctccagctcctacccaagagctggctctaggcctgtgttatatgttatatttagcctttttatatatgacccttgatctgtttgtatttgaacactgtgtgtgtccactttaatacatttgtgcagacatgcacattacatacgtgtatatgcctgtctctcatctagattatcaagggagagggaaccttgcagccaagaatgactctgtggatagtgtgtgccacaagtgttattcttctctgttaaccttagggatacaacgggaagcagagcttctagtgtttgctgtttcatggcagctaagtgggggccttgggtgactcccttgtgctctttaagccacacttcggggccctctctacagtattagattcttttttgcctgattatgctctgtctgcacctgtgtatgtgtgacagtcacttttgcatggcttctgtgcctggcttgtggcatttagggacagggtgctggaaccacagtgtttagtttgtcagaacttgttggccaaccataagtcactgtcacctgctgtgtctacactgttgccccttttcttgcttttttcctgagagactttagctaggcccagactagatgagttgcaggtgaccttctcttcccagctcggcagctttagagtagaacaaacggccatcaaacattgatgcaagcactatccctgcagatccagaaatcaagactcaacaggttgtgatttgcccaagagtacccagctgctagcgtgctcagaccatcactgcttctgttcagtcgcagatagccgtccagtcaccaatgcttttgacttgttccaactgaaaagttggactgtcactgaagtctgttaagtattgctgaacaatcctgctataaaattctgccttcccagaatggaccgacagaaggagccaggcaatcagctccatgtttgaaagaactgttgaaggcaaatgtctgtaatcgtagattaatatggcagcttgcctgaactgaacgcaggaaaactgtcttgagtgtccaggggttgaagcatcacactcttagaagacataccgcctcacggtctctgctgggccctgaggccacagacctgagttatgttccgaattggtaggaaaaggtgcagctggagtttatatggtcacagggtaataagaaagagggagaaagcagagatggcagtttggggatgtgtccctgggatgtattcactgccctctgatatgacagctggcactgcactgttcaaccaccagccactggggtattttttaataaattattccctgttgtaactgacaattagtgcttatgaaggaaaattggaagatctttaagaaccagtttgccacccaagtggtaccactgtttaaatcttgatgttaaatgttcctttagatatctctgtgcataaactttggtgtttacatagttgttattctactgtacatacaattttgtcctttttgtacttaacatataaactttttttgccatgttatcagtcgtaaacaggattttatggtttacagtctcttccattgagtttctgtaacattccctggctcacttctgacagaatgggttgttcccatgtcctggttccggtggaaatgcttggcctctgggcaacagaaacacacacccctcccaggcacagtcccttaactccaaatgccaattaaattaccacaggagcagtaatgagtgactagaaaaggtaagcttgactcaaccccattcttcagagaccacctcactgcctgccttgtgtcccacacagtttacctcaaacttggatcagattggcaagctcttgttagaataaattgcattctcccaggccttgtttgatcagaagtgagcatctggcagtaggacctgctgagccatggcttggctaatgcattggaagtcattggaattctag

SEQ ID NO: 35298 - DNA, 1134 bp, Mus musculus
aaagcctaaggcccagggcaaaccaaggcacacataagcccaaggcttgactgccttaccacctccttttcctaggtctggtggggatggggctaggagaaggtgactcaggccagtggggtaacagaccctgcattgtagatcctgcggttacctaagagaagacagatatcaagagtgactccagaagtggggtttccctgagagtggtatgtgttgggccctggatatagtggtgacttctgtcttgacccatgcagattgagatcggcgatggagcagagctgacagctgagttcctctatgacgaggtacatcccaagcaacacgcgttcaagcaggcgttcgccaagcccaaaggccccgggggcaagcggggccacaagcgcctcatccggggccccggggagaacggggaagacagctaggtgtctggactgggaacagggccgggcacgtggactacagggttgccactctgccacccctggacttccttcctccccagcctgggctctaaggaattgctttcctgtgggacaaggagggcaggtggctgaccatatctgagggcctgcctctggaccagcactgtgtgaccttgccctgtcactgtccctgcctctcatctgtgtgtacagggtggctggcgaaaccccaccttggcacaaacctagcctccagaaaatttcgtgctgtggttgcagcccagcccaaaagcctttggctacagtgggtggggacggttggcaggggccagatgtcacaggaagggatggttgaatgctgtattttgtaaagaataaaatatttttaaatcaatactgagcctgggtgcctttccccgttcagagggggtctgatggactcctggcctcaggtgtgtggcatgctttgagtgtaaggacagaagccctacccatgaggttatgaagatctgggtgtctctgtttcctgtggttgatgtgacaagttaccacaaactcagcggcttaaaaaagtggtagtttgagcccaacctgagcagcatagcaaacaaacccctgtttcaaaaacacaaaagaaaaccttgcagatttattcttagagatcttgaggccatggtgcacacagccggctcctggcagagttagc

SEQ ID NO: 35299 - DNA, 1494 bp, Mus musculus
cctcagagcctgggaatctcgtgctttgccactgagagtcttgcagcagccacagtgcctttgcctctgtatcctcccagtgcagaagcgtgagatagttactgcgtgtttctaaggcagcatcagcaggagcaggtttgttgcatggtccaggactccaattgtcttgatgcctctgccattaagtagcacttttctcatgtcaggctgtgaaatttactctgattccgggaaccatgcctccatgatccaagggattcgcaacagtcgagtgccaaaatatatcttccgccacaatgacgttaaccatctcagagaactgctgcagagatctgacccctcagtccccaagatagtagcatttgaaactgtccattcaatggatggtaagtatgtgctgagggtaacctgaagcctgggatgcagagctgggcttgaactgtttgaaagtgtgtggctctgggcacgtagctgcttgacagtgtctgaggtcccagacactcaactccagaaacaaaaacaatatgtttccttttggtttggcatttttttgcactgggactctgtaattgagagatgttacatggatgttacatggatgttacatgatgttacatggataggtaactgggttttctgtgctggctgttgctagattatataacctcatgggacaagaactgggggaagttcattttctctctggtactaaaaatgaccccttagaatgtatggcactttgctttggcgctcaccattgtcactgacattttccttggctttcctcaggagcagtgtgcccactggaagagctgtgtgacgtggcccatgagtttggggcaatcacgtttgtggatgaggtccatgcagtggggctctatggagctcgaggtggagggatcggtgatcgggatggcgtcatgccaaaaatggacatcatctctgggacgcttggtgtgtgcacgggctctgtggctctgtcctttcacgctgagctttgggtatacaccaaggccagtcactggctggtctaacttacaccaggaccggaagcagggaggtaacctgtaaagcctgggctgttttgtggtgaattttgttctcttgagatgggatctcagcctgtaacccaggctagccttgtttctcccatcctgtaacccaggctagccttgtttctcccatcctgagtgaagctttccatctgagagaatgctagcccagctttgccaaatccctggggacgtggaggctcacagactcccacagctaaatatgacagaaattacatttcttgtcatctgaggtcattccacccatacttgactcttagtgtaatgctggattcagaaggaggggggacgccagtgctcttctgccgggcattgggaaatgctgtgctctgtgcccagcacagagagtgctctggctctccatcccgctcctctccccacgctggcaccctgacgccggggcttcaggcctggccgcaca

SEQ ID NO: 35300 - DNA, 1184 bp, Mus musculus
atttggggggatactggggaacccaagaccctccagagagacctcctggggggagcccaaatcagccacagtcctggaaatgattaagaacagttttccatcgtaggggagctataagaagccacagacctccttgcaccccactgcctcagaccctcctagaactgatcacaggaaactcctttggaacatcagtgtgtcccaaaattccaaagcctagccagggcaagagctaggggcatcatgttgcctacagtgcatcctattcctacccctatggtatgtgttaaataaacatgagttattaagtgagcattgcagtagctttgagagctgtattttacatacaagagaactgaagccctaagtatggtaacgtagccgaggccagtcggccagctggtcaggttcagatgtgagcatgggccatcaaagtcaggatcctgctcttttgtcctacaggccaaagcttctcactgagactcgctgcgacatttcccaggggctcacacccctgctgcagccacaaacacaaaggagaggaaggcaggccccaagcatgagctggggcgaggaggggatcctgggacagaagttgtccctgggcttcaggaagcagtagtggccacaagtgccatttgagtgtcacacacaaggagtctgatgtcttgggtagaaaaggtatcacatcctagaggcggtgggaaggatgggattcaagagtcacccagaacaggggtcactaggaagctgcgatgtgggtgttgaggggacaggcaggcagggaaggcgtgggcccataaggctggtgtgtgctagcgcagaaggaaccccttctctgcagagccctgctggggctaccatggttgctatgagacagccgagtgctaccttctgcccaatgctgctgtcttttcctagccacagtggatctctgtcttgctacagactagggaagatgtctcaggccgaggcttccctgctagacttcagttcgtcctcctcttgcccaggcaggcatgtgacgtggtgcctggcttagccaccttgcccacttccgtgttacctactttccagctcatggagcaggcccaggaggtgccctcctctctggaatctattccctcgcctaagagggcccaggattctccttggaataagacctgaccacagggaagtgcttt

SEQ ID NO: 35301 - DNA, 1235 bp, Mus musculus
ctcttcttggtttgtttttttcttttcttgtcttttcttttcttttcttttcttttcttttctttctttctctttttttttttaacaaagtgttatttttcaggctaaatgcaacaatggattgtataaaccaatatttcaccccctttcctaagacagagagagagagagagtgttctcagtttcttgtttcaaaaagcaaaccatcgatgtattttgttttcaatggaaaagacaaaccccatgttcttgaccaaatgcattttgcacgtgtgtgaagtctgatttcccagcaggccattctggaagggtgggttgtcactctctgggcatcaggaccctggttctaccatttcctacctgtgacccagcccacctcagtgccgccttggcacagtcccgtcgctaggagctgcgcctggtgggcactggtggtctttgtgttgtctgccctcctaccaaccttctgagagtcctgcagacctccctgccaggtcctactggaggtggtgctgcaggggagtggcaagcagtagcattagccatctgggctccgcccctgagagggctgcgccctggccctttcataaactgcccaccacttctgtcctcatctctgtctctgaactgggaatagaggcccacagtgcctgtgtaaagccttcccagtcccttagctttgctgtagactccaacgaggttcacccccagcccccttgtccaggtgcacacctgccctggcccatgttgcccgtgcctttaacctgcaggcaacctacacctattgcggcccaagagctggggcaggtggggcaaggactggctagtggggggtaagaggcccccatcccaggatccatagcacaaagccacgggctccataatactcctccggtttcatcgcttctcagccttgcttctccctaggcaccatgaggaacaggaagtgctggggtcctgatgggacgcacacccgcagggggcagtgactgaggccacatcttacctcacagggctggttttcagggattctttagggaagcagtttaaaatcttgccacagttgagaaattggcaaaaaaaaaaaccaaaaacaaaaaacaaaacttccattctgtacatggcatgtttctctctctctctctccctccctcccttacccccccccttctcattttttaaaagaaaacccagaaacatggatcagagtgtaaatgagggtataccagagggtg

SEQ ID NO: 35302 - DNA, 1506 bp, Mus musculus
ctgtggtttctgccctccctccctccctccctccctccctccctccctccctccctccctccctccctccctctgtacctctcctgtccttccctcaaacacatccagcccgtgcctgctcccgtctattcctctccttcctatcttttggctaacctcatggctcctgtctcacccccacctcttccttcatctcccctctgtatccctttctccagtctagagacggccaagtctacctctggggggacgcctggctcagcccccgcagacctgcccacccctttctcgccacccctgacggccctgcccacagctcccccaggcctgctgggcacaccttatgccatctccctctccaacttcatcggcctcaagcctgtgcccttcctggctctaccacctgcttccccagggccaccgccgggcttggcggcctacactgccaagatggcagcggccaatgggagcaagaaagctgaacggcagaaattctccccctactgaggccggccggctgaggcaccggcaggggcaggcaggaccgccggcaggggctgcctccacatccttcctgcccaaggagactccaccatggggtctcaagcgccagtaatgccagacgcatggatgcaccccctaccctgccccatctttggagatcctcctctgagaggggacagtttctggcccagggttctaggagtatggcagccccagggcaggggccccacctctacagacctatgcttggatgcagagaatggccaggggctctctggagccctgctgtgggaggggttactcatgtcccctccatccctttgggcttcatcctgctgtcccagtgggaattggaggagagtgaggggcggccagggccaagcttctcctcatcccctgtagatcctgctgcttctactgatacccttttgactggaatagactggctgggcttgtccgggggagggcaacccaaagagagggctctgcctgcctgtaggtgtggcctggggggcaggggcccagtctcagcagcagacactctgtacagttttttcaatccctgtttttgaataaatattctcagcgaccagaaagctgtgcagtaatactagtgttggggtaacaaaacttccagggaagggatgaaactgaaaccccaaagaaccccagtctgaatccacagtccctagttgacccacagtcccttcctcgtgtcagttctggggtgaaaccaaagggccctttgggggtcgtgtgttcaatctcctgcctttagcagcaaaccaatcaggtagttttctgagcagcttgggtgatgagtttgagtcgaactgcccagcttctccatggtacagatagtaggtaactcggtacgcttctccactggttactcctgctatggtgtaacccaaatcctgctccgcttggttcatccttctggctgtgagttcttaggaccctcatctctgtgaccatgcctgcctttctcctctttggacc

SEQ ID NO: 35303 - DNA, 1107 bp, Mus musculus
cagaagagggcatcagatctcattacagatggttgtgagccaccatgtggttgctgggaattgaactcaggacctgtggaagaacagctagtgctcttaacctctgagccatctctccagcctattattattattattattattattattattattattatgactttaatgtttttatttgtctcgtgtgtgctgtgcacatataccacagctcacatgtagagatgtcagcagacaatctgtgggaatcgagtgggttctggggattgagtgcgcactgtgagaggccaccaccgagctcctgggcacttttgcattcttctccttttgggcgtcatggctgccatcagggactgtttgccaccatttggcagatgggacaaagtgacaagtacagatgctcacagctgctgagcccacgttcaggatccttccttgcccccttgtctgcgctgccctttcatgctgggggaggggaggttgctaagcagccggccctgcccgcaccctgtgacttccctcctcgcttcgtggcagggagtgtagagactgggcggaagctgcatgtgatccctcgagccaagaagggtgctcagggccagcccgcaggccacagcagccacgtcctctgcatggccatctcctctgatggcaagtacctcgtaagactgggttggccctgtgggcaggtgggaggtttgggtgtgtggtgtgtgccggtggccattaccttcgttcccacaggcctctggcgaccgcagcaagctcattctcatttgggaggcccagagctgccagcacctgtacaccttcacgggacaccgggacgctgtgtcggtgaggctctgggtattgaccacctgcctagcatggaagcctgctgggtgtgccctcctggggccaggcgccaggccccaggctcatctacagaggcctgtgggtagtgagtggtgtgtgtgtaaaggccgcgagtgcgttgaagagatggggagcgatggagggagaccaggttcagctggaaccacagagggcctgaggggtatgtagctgtttgaggacaggcaagcatgttcctggctctgggggaacaggttcctgggtcatgtg

SEQ ID NO: 35304 - DNA, 2008 bp, Mus musculus
gtggggctctgtgggctggcgagggggctggacgttgccccctcacagcctctctttctaggggttccattgactgtatccatctcatcaacgaggagcacatggtgtcgggcgcagatgatgggtaagagtccctttctgatatgtccgactgctgccgccaccagtgcttcctgcctgccaggccctggacttagctcattttggatcagtggccacatccctcagctggtctatgtgattggtcctccctgctgtatgcctttgtctggctctggcccctcagactatctttttcacccacagctctgtggccttgtggggcctctccaagaaacggccactcgccctccagcgcgaagctcatgggcttcacggggagccaggcctggagcaacccttctgggtgtcatccgtagccgccctgctcaatacagacctggtggccacaggtgggtgggtgctcggtgaggtggggagggggactgtgggtgagctggtatggggcttgcttactgactctctgacctccaaggctcccataatgcccgtgtgcgactttggcagtgtggagagggcttccggcagcttgaccctctctgtgacatccccctggtaagtggtcctaaatgcataaccctgtctttgcaagactctggaggcccatggaatgagcaatttctgcttttctcacccagagacgtctattcagggcaaggccacttactgtcacagagcctgtcccacttttctcctctgttccccaacccctactccctccaccctgtcctggctctgtgtacaagctgagtgtgagtgggtagagggtggaggcctgcactgggcttggttctctgtagtgggtattgacttgagaaccaggctgggctgtgtggagttgactgtccacactggagtgacctgtggggttatgttatgatatgtcacacactccagtgcctgaggcagctcttggcacacttgatgggcactgtctcctcagtccttaccatctccctgcttggctgcggctccactcctacagtttcagagaggaggctggggctcatgggaaagggttggcacacctaaccagtgcaccaggcccctgcctgctgttgggagccgtggtgacgaatgttctgatgtcttaccatgtccctctctctcaggttggttttatcaacagcctcaagttctccagtgctggggacttcttggtggcaggcgtgggacaggagcacaggtatgtgatgggggtggggccgagggcaaggtagcactggccggttgggagtaggagaggggtggcgtgcgtctgcctcagtggtcattcattctctgcaggcttggccggtggtggaggatcaaagaggcccggaactcagtctgcatcatcccactccgcaggctccctgtgtcccctgttgccggctcctgacactctcccttatttaagtgacttccaggccccgcccctgtcctcttttgtattaaagcctcctattttagaccttgttctcccttgttcctctggtttctgggagggtgaggggagggggtaggtgtgtggcaaggaccaggaggtggcagagacctgggagggacaggactctagctagctgctctcagctgaaggcttttgttttcagagcactgggtgggaacctcagccggctcttgcatgacctcattagacagctgctcacccatcagccaagaaactacagctctccattccttgggaaggctcaagccggggtctgaggaccaatggaagctagtggagcctacagttcaggctgaccacatttccctactgtcccagcccaggaagctggaagggataccctgccccgcggtgggacaaggtcagaatcggggaagagagtttcagtctgacagagctagctagcaaggaccctgctgggaagatgtgtcaaaggaatactgcctgcttttacagattgggaattctctcctgttgtggggtgcagcagtggatgag

SEQ ID NO: 35305 - DNA, 1215 bp, Mus musculus
cggtacggctgtattattcatgagtagactctgcatgctcagttcctgtgctagagggagagcccttgctgtggccctgaaggaaaggacagttagtgtgtggtagttgactaacctgtgctctcttgtcctggccacaggagctgatacaagtgatgcaagttctgtgagcctggatgttcgccctggcagccgggagacttcagccaccacactttctcctggggcaggcaaccgtggctgggacgacggtgacaaccgcagcgagcacagctacagtgaatcgggtgccagtggctcatcctttgaggagctggacctggagggcgagggacccttgggagaaccccgactgaaccctgaagccaagcttctggggccccctcgggagctcagcacccctgagaggggtgaggagtaatgataagccctcaaccctcctgtggtgcatttgctaaggaactgagcaaactctctagccctcttcttccttaacctgcctagcttgggctgggagtaccaggagcctgagttgtcctgctccaagcctaaacctccttcctcactgcccttttggctcccagggccgaaggagccagagactgttatctgcaccagcctcctgggctgccaactttgcagactcttattggagcttccagaacccagaataaagtgaattactttcttgtttcacctggatttgagttggtttttgtctgtcgtatcttggggagtctttgtggatagactgtgaatgggcaggatctcccacgtccgaaaagaccatgcctgagttctccaatcagagggatattagaggaccttcattccctgccctgtcaccccagtggaaagtcaccctgcattgcagtagccccaggggctttccttgctgctggatagcagagtaccctccaggtctcaggagcagggaactcacaggttctttgcatccaagagctacaaggctttgagtctgcagcttcagtgtacctgtgttcccgctgggacctccccagaaggtgaagacatccatgctggtcctgcccagtgcccttgttcctaggcatgttcacatatactgtgtgtgaggctgggtccgtgtgaacttcagactgtgacggtggttgggcatggctgtttgtgtgtagatggttggctatgtgcatatgtggttgttttttctgtgtgtatggttgcatttatagcgct

SEQ ID NO: 35306 - DNA, 3025 bp, Mus musculus
cctaacttaagtcccacattggttttttaagttggggaaaatcatgagaaagtgagtgtttccgatctcttattctctccacagtggccatctctgagcagatgtccctttccacgtgggcacaaagtgcactgcagtgtgagggtgaggtggcgttgtggctggaaaagatgtgcttcaccgggacaggactgaaccccttcagctgcctgtcttggtggcctttcctcttctttccctccccattagaaagctccatgttaatttatttcttatggacaattatttattattttcatttggggacaagggtggtgggtggaggttataaagaagatagcagatagtaaaggaagttcttaaatattccagacccccagctgctggtcaaaaacagaaagggagagaagggtccgaggcagatggtgaattaattgaccatggaaagagaattagaattaaccaaaagttcgattaaacagctatgttgtggggagatggcctctcaggaaaatcagggtgccctgagactggctagttgggggtggtgagactcattccatagaaactgaaacttgggatcatggactttgctactgggaagtaagtaacctccacatttggaactattgtcctctgatgatttcacaggccagttctctgctgaaaagtgaagctgtgggtaggtagcctgggttgaggtaatagactgttgattttgagttggggcttgtcttggcctccctagcatttcaggtgatcagtatgggcctggtttctggtccctccatttctctaagtatcacagggaagcccttcctctgtaggagtcttacgtctggctttttttttttttttaaagagtacgaacacgagtcattctggtctcccttcctttgtttcaaataccacggcaggggtgtctagtgcttaaacataaacactggctgttttctattactggtgtgtcctgcgtcctatagccctctgtctcccaagcttttccatgcagccctttgattaataactcctgtctggctttacctccttcccttggctccaacctggttgggcaatggctagatctgcctcctagtccaaaagtatcttaagcactgcctgtgactcttgactagcgacttctcattgttagggggaaaggagggagcttaaaggcagacactgggattgtcccagagacaaggagagagatggttgatggggtgtgtgtactgtccagtaacaccaaagtggacttgtgctttctctgttttcatgtgcaccctgtcagacttaactcttctactcatagaagccttagatctacaatttagctatgcaaattatctgtaacaatttaaaaatagcagtttcaaccagtgctttctcagtcaaatgtagtccaagaatcgatagtcaaggcatttaattggcgtgggttctgaggttggggctggtacagtgggagcgagcgagtccagatctctataacttgtagaacgcattcagagcttgggttacatggatgtccctcagacctcggaacactgagctcccagagttgtctctgttacatggactcctctcagacattggaatactgagttcccagagttgtatgtctgtgtgtatgccctgctagccaggaagagggctgtttctgtgttcacaaatagtaaattagtagaaacaatttcagtagggaactggaactggtttttaagcagccaggaagtaaatgggaattctgagaggaacacgtgactgctgtacactccagcagtcatcctgggcttggagcgtacttcatctttgcagcagccataactctagacaggcctcctggctaaaggtttctctgtgataacatgcagcttatgttgtataagggtgggggtgagatcataggagattgaattgcttactagctccatgggctttggcaactcccctccctccaacaaccctaaatatcctgcttttcaaatggacttatggggaagtgtgcatgcgcaccaagcatgagcatgtgctgagggaagcaggaacctcacaatctattgtgcttagattggaaacccgaggtggtagtgggtataccagctatgcttgtaatcctagccctcaagaaactgaagcaggaagaccattttgggctatgtatacagtgagaccatgtctttcatggaatgttttaagggtctcaagaagcccagtcactctggtgtattctaaatccctgttctctttaacactactaaatgatgcagatacttgctaccttaggtctgctgtgtcccctctgggagggatggggtagctattgaagaaagtaagtgaaccacattaggtcagagccttcttaatggcttatctctttagtccttaccccttgagtaacgctacttaagtatctgtattcctggcttaaagattttgtctggaactcttgtaggaattaatgtgtggatcatatatttataacttacaactaaaactgaagtttcccactctgggagcgtgaagcaaggagctggggtctgttttgctgattagttgaaacagaagatcaaccatagaggtgggactgcaagtcgcaggcagtcagtatctttaggtgtgacatccatggctctggaactgagtccttgtctacaggggaaggtttttctggggcgttacattccttgttcctacacagaccttttgtttcccacttccctttgctttccacatgcccaggtctgaaccatggttttctgtgcactctcagctaggttgctctttcccagtattactgctgggagaagtccccttccccgaggatgactttctggctccactgctgactagttcccaggaaatcagcaccttaaacggccaatctgccaagtgctgacctgcccactgctcaccttcagacccttctgcccctgtgtatccaaatcggtgtaatccctcaacgtctgttctgtgccactagcttggctttaagccgtttatgaatacgtgagtcctatgatga

SEQ ID NO: 35307 - DNA, 1187 bp, Mus musculus
cccatggactgcactattgatagaacatgcttgtttgcctataagcaggctttttgacagtgttggagacaaccaaccttctcttggtttcaaaataaggtttactgtacgtcagttgtatttgcacagagactagtaattaaactcaagtcctctgcctctccaggagccttttgagcacgagtcattgctcctcaaccgaaaagatcacaagctgaccaaagctgagaagaaagcagcaaagaaaagctatgaggaggacaaacgcacatcagtaccctatacccgcccatcatatgcacagtattaccctgccagcgaccagagcctgaccagcatccctgccttcagtcagaggaactggtgagttgctagaggaagagtctgggtgctctgcaccagacccctatcattctgttcctatttcacagggagaatctacagactattccttggctgctatagaaagaaggtcctgctctagggtcaggtgttacagcagttcagctgccccagtgctctgaactgctctggtttgacatccttggctgaagaaatgagctgctgattttgcctctcagaagagctttctgggagaacggtataagatggctttcttatgggccaactttgagtcacatgggaatgtgtacacacaaagaaggtatcttcctcagaaagcttgctgacaggtagggttggtgagatggttagcagatagagtactctgtctgcaagcctgaggacttgagttcaattcctggaacttacatgtaagcaggaggagaaaactaagtctacataaaggtgtcctcccacatacatgctttggcaagtatgtacccacataaacacatccggtacacacatgcacaataataatcatttttgttcattatttattaaacatttactatatataaagtattcatccataacctggcagattgcatttaaatacaaagaatcaatgaagtcattccaaatcaaagtgtaaaaacactcctgagaaaggctaccagatggccaaaatgtcttgtggtaggaaataccaccaaatataatataattttaaaagctcagaaaaaggaagtttcttcagaaatctgcaatcagaagaccaaatgtgttgcacacacctataatggaagcatgtggaggcaggaggagaattcaaggttatcctt

SEQ ID NO: 35308 - DNA, 1240 bp, Mus musculus
aatttgggaaggtaaggcaggaggatgccttgagtttaagggtagctagcctgttctctagagagagagggccctagtctcaaataataacaaaaattcctttgtacacattttatcatgcagttctaatctttttttctcagaagactgttcattctaatttgaacaagcagttcagttgttgattgatcaccttagtttgagaatctttgggtttaaactttaaaaaaaaggactggggaaggactagcctaggacttactcgggcagttattcctaagggagagcttcctatagcctcagctgtgctgtaggggtgctaatgaggtgctaaggagatcggacagctctgcagctcccaaactcccactgcttccccagctctgttaaatgttagggttttctgcttttctgctgcccctgtcttctaagtccagcttggtgtgtgcacggatagcccggtcttgccgttgcagactcctgggctccctcacttggacttgcagctttctgtgctccagtaggaaactgtctcctagtgttgacagtctagctccctgtgagcttcagtggtttcaattgccgtttcaatgcttgactggggctctgtagcagcatatggctatttacttgatgtgtgcgtgtgggaagtgtacgcacctatgtagaagtctgaggacaagttgtaggagttgcttctgttcttgcattgtgtgagtcctgggatttaactcaacaggcttcaaggcagcaggccatgtcatcgtgtgttacttagtggcagcaggccatgtcttcgtgtgttactcagtggcagcaggccatgtcttcatgtgttactcagtggcagcaggccatgtcattgtgtgttacttagtggcagcaggccatgtcattgtgtgttacttagtggcagcaggccatgtcatcgtgtgttactcagtggcagcaagccatgtcattgtgtgtaacttagtggcagcaggccatgtcttcatgtgttacttagtggcagcaggacatgtcttcatgtgttactcagtggcagcagaacatgtcatcgtgtgttccttctccaccactcccttttgtttttattctgatgtgacagacgtaaactttactttcttttctttttttttttttaagatttatttattattatatgtaagaacactgtagctatcttcaggcacaccagaagagggcatcagatctaatcaaattcagtatatctttg

SEQ ID NO: 35309 - DNA, 1207 bp, Mus musculus
agtcctttagtctctgcttagtgaggatttccttgacacccagtgtaaagtagcagctcctcctggcactcaccaggcttcacactctctatattctttttcctcttgctgtacctagaatagtgcttgggactataaataagtaagtgtgtgtgcatgtcctgtgtctctgtgtggacaggcaggcatggacgtaggagatggttctcagcagcctgaaaggagcagcatcaggaaggcacgagcaagtgggagttctaagacatctagtttttattctgtagctgttactttcttgtcaaagcagccctgagatgcttgagctgggcagactcatccaagtgtgtatttaggtagcattctcatagagaagattgagatttggatttggttagtttgccttgctttaaaaagctccagggattcctcttcagtatgattttcttgggaaggcttgtgttcctaagtgcagctgtggtgattctgatgcctcttgacctcctcttaggaccctactgtggacatgagtcggtaatgcccactgaggacttctgggagccatgtcagacgaatccgcctcagggagcgatccagacctggacccggacgtggagctggaggatgaggaagaggaggaggaggaggaggaggaggtggcagtggaggagcatgacagggatgacgaggaaggcctgctggatggtaagtacctctactgaaaacagagattcccgggagaacatggtatttctagctgtttttcttttttttggagggctggggttaaagggtgttgagacaagatcttgctctgtatagccgaggctggcctggaactcactgtcaaccaggtttaccatgaactgctgcaatctttatgcctcacttttctaagtactgaggttgtaggtgtatgtattatgccaaggctctagttggattttgtagatcgtctgtaatgagaagaacaagcagaggaaagggccacagaacttctgtggtcattctcagggggtagatggttgttctttcaaggaaaccttgttttagtggtaggaagatgagcatttagttcatctttgacaaaaaggtaggctcaaatccagagatggagaaatatgtggtagagtccctgtgccaagtctgcagccttggaagtatgagctctcaggtatagtagtgtcccgtgagtttcctgaaatcacaa

SEQ ID NO: 35310 - DNA, 1102 bp, Mus musculus
atggcaacaattttagactgttgtagctttctgttctttttcatttagatttttaagagtttcactgtagctcaaattagccttgaatttccagtgtagattgactggcctggaaattagtgctttccagcctcagcttctcaagtgctagactacaaagatagacctcattctctgtatatatcttaattagaaggtggtgtttgtttgtttcatataactgttggcaggctgtatatggatatactttggtacttgtcagtactgttgaacagaaacacttaccaacgtcttatctttttacttttctgtgtcttctttccccctcttttgcaatcttatatctgtttactaatagatcagtactttggagattttaaatttggaagaccagggtgcacttttgagtgatgatgaaatatttgctagtcgccaaacaggaaaacatacctgcatggctctgcgcaagtattttgaggctcatctggccattaaattggaacaagtcaagcagtcacttcagaggactgagggtggtattcttgttcacccccagcctccatacaaggtaagaggataataatttatttatgtgtttatttatgtttacttttgagtatggtgacatctttcctgtgatggaacaccatgaccaaggcagcttgggagaaaaggtttttttttggcttatgcttccatatgactgttcatcatcataggaagtcaggcatctgaggtacaagctgatgtagaggccatggagggatgttgctcactgacttaagtctattaagactgattcatgagctgagattcttttttgctacaatctgatgtattctttctgtcatttgttttagaagttttccacttgaatagatcaaaactgtggtaggtttcttacctatttcatgcctggaaacatcatgactgactagctagtactgaaggtctatatgagtcatgccaccataaaaatcactttgcctgtgctgtccattacaggtcgggccattatggactttttctatgctgcccattacaattactatgattacgttgcctttggcaattaggttttgccacctgaccctgctacttt

SEQ ID NO: 35311 - DNA, 1163 bp, Mus musculus
ttcttcttcttcttcttcttcttcttcttcttcttcttcttcttcttcttcttcttcttcttcttctttcttcttcttcttctcctccttctccttctccttctccttctccttctccttctccttctccttctccttctccttctctttctccttctccttctcctcctccttcctccttcttcctcctccttcctcctccttcctccttcttcctcctccttcctcctccttcttcttctttcttcttctgtgtgatgttagaaataaaggactggagtcagaggcaggcggatttctgagttcgagaccagcctggtctatagagtgagttccaggacagccagggctgcacagagaaaccctgtcttgaaaaaccaaaaaaaaaaaaaagaaaggactaaacattatgtagcagtgctttacatagggacttattgactcaaaagttgtagaaattgaaagctattattaaaagtttttggcaggcattgaataagtagcagatgatatgtatcataattatacataattcttcttataggcatgctcatatactcatgagcagattgtagaaatgatggaatttttgatagagtatggcccagctcagctatattgggaacctgctgaagtcttcctcaagctttcctgtgtgcagcttttactacagcttatttccatcgcctgcaattggaagacctattatgcaaggtaggactaaaggtttcatgaagttcataagatataacacataacacataatgcacgtgtaacaagctattgttggattgaagttttagatttgactctgagaaggaagtagattaagtatgagagtgatttttattttcttattatttaacttgtttttttttttaatgttgttgtgtgtatgcagttgtataagcttatgtgcctcacatgtaagttcttgaggagctgactaggtcaccaaataccctagaatttagagtcagaccgttgtgagatgccatgagggtgatgggacttgaacctgggtcctctggaagaacagccagtgctcttagcccctaatctactagatttttctataccagaaattaaaatgtataactatattggagtccaatccaggaccttgcacatgctaccactgaggtacacatctaggttgtgtt

SEQ ID NO: 35312 - DNA, 10644 bp, Mus musculus
aatgtcagttcttaggcttgatgccaagagctttttagccaataagccattttgcccaccctgtctgttttcttgtaaaataacataatttcatttttttttattgctgagtaagatttctttgtgcataaggtttgtccatttgtctgttgatggatgcttgtactgatcccataacttggctgttgttaatagtgcacactaaagataaatgtataaactgttcctgtaatatcttgacatgagtcttctagctattagttttatgaggaataatgtaatttttcctatgttataggtatcagcattattttgggcgtggctgagggtgagttctttatccatgatgctgaaattcagaagtcagcacttcaaattatcatcaattgtgtatgtggtccagataaccgaatatccagtattggcaaatttatttctggaactcctcggagaaagctgtctcagactcccaagagtagtgagcatactctggccaagatgtggaatgtggtccagtccaacaatggcatcaaggtgcttctgtccctgttgtccatcaagatgcccattacagacgcagaccagatccgggccctggcctgcaaagcccttgtaggcctgtctcgaagtagcactgttcgacagatcatcagtaaacttcccctttttagtagctgccagattcaacagctgatgaaagagcctgtgctgcaggataagcgtagtgaccatgtcaagttctgcaaatacgctgctgagctcattgagcgtgtatcaggaaagcctcttctcattggcactgatgtgtctctcgcacgactgcagaaagcagatgttgttgctcagtcgaggatctccttccctgagaaagagctgctcctgttgatacggaaccatctcatttctaaagggcttggagagacagcaactgtgctgacgagagaggctgacctgcccatgactgctgcctcacattcttctgccttcaccccagtgactgctgctgcttctcctgtctctcttccccggacccctcggattgccaacggcattgcaagtcgactgggcagccatgctactgtgggtgcttctgccccttctgctccccctgcccatcctccaccacggcccccccagggttcattgcctttgcctggcccatcatatgcaggcaattcccctttgattggtaggatcagttttatcagagagaggccatcaccgtgcaatggcaggaaaattcgagtgttgcggcagaagtcggaccatggtgcatacagccagagccctgccataaaaaaacaattggatagacatcttccttccccacctacgctggacagtatcatcacagagtatcttagagagcaacatgctcgatgcaagaaccccgttgccacctgtcctcctttttctctctttactcctcatcagtgtcctgaaccaaaacagaggcggcaagcgccaataaactttacctcaaggctaaaccgcagggcatcatttccaaaatatggaggggtagatggcggatgctttgataggcaccttatctttagcaggtaaggagaggttcccggaattccttgggatgattcttttatttaaatcagtgtttggtcagtatcatccctgagtcattagttaaagtcatttgctggcctgaagattaactgagtgtcctttatgtgctgtatgaactaatcagtcagttatgggttatttagattctcggcagtaagatctctttgctgtcgtcacaaccagtaggttgttttagccatttctcaaacttgccttttgtgccagccatgtttccttctgtgtgattctttataaatcataggtacagatcatgggtctacacactttccacaagtctttttttcattgagaatttaaactattgaatgtcactctaatgctttagaatccactttttatttgaaaggcttcacattttgaaacaaaataccatctagcaaaattttgtgtttcagagttcccggacatgctttattctgatttatgctcttcccccaacccctcgtttagatttcgtccgatttcagtattccgggaagctaatgaagatgaaagtggcttcacctgttgtgcattctcagcccgggagcggttcctgatgcttggcacttgtacagggcagctgaagctctacaatgtgtttagtggacaggaagaggccagctataactgtcacaactcagccatcacacaccttgaaccgtcaagggtgagggttccttcctggctgctctcattttaagatggattaacaaagggaactagagttaaaagagtcttaccatttattggactttattttagatgagtcgttaactagaattgatgttgactcatttcagaaggaaaatgagatacttggccatcttttgatagggggggtttagctatgtgaggtgatacatggggaacagaggaaggacttttgggagttcaaagccaatttgagttaaagttctctgccagcccgagtacacaggacctatttcaacagaagaaaaacaaaaaagcccagaccatcaaggtgggttagtgggggaggtgcttactgtgcaaatcctgactgcctcagttcattctctgcaaagaacccaggtaaaggtagagggagaaactaactctgcaaagtcgtcttctaccctaaccctaccacacttccccatacctgtataccatacatacatgcacagtcagtaaattatgaaaaaagaaccagctttaggcccctagtggtaaatacatttttctagccccctataggcacatgtaattaaaatcctaatgatttttaacttctctgccttataggatgggtccttacttctgacatctgccacttggagccagcctttgtctgcactttggggaatgaaatcagtatttgatatgaagtatgtatttatttattatagcactgtatcttatattttgtgtcttacttaaccactttatttccttccatcctattttaaattataagctgttttgaggaaaggaatattgtcaagtgttaatttttcttccttgagatccacatttaataagaatttgtcttccttcacaaataatcttgtgatgccttgatattcctattatacagtggactgttcactaaccccaaatggacagttatttattatgttcacatgatagctgtattgatttcaaaagcacatgtgctatattctctaatcaataaattctcattatttgggatctgctctggtggactgatagagggactttttaatctatgtatacaaattgttttcttcttcagaaaccaagaatctccaggtaagtgtggtttgcaagaggttgaaaattaccttaattttcaggtgattgaaaaatatgtcctgacaatctattacctcagtaattttgttgtctgtaggcattccttcacagaagatcactatgttgagttcagtaagcactctcaggatcgggtcataggcacaaaaggagacattgcccatgtaagtatttaagaatctatttctatcaagctgattttactcatttgttcacattgaaatcttctgaaggtaatgtgggaatttgtgtgatagtccatgtctataatctcagttattccatagactaagacagggaaactgtagtctcagagttggcctgagcaattaccaaatctcttcaaaatacattttaaaaggctgggagctgagttgggaatgtagctcactgaatctagtattttagacaacaacaacaaaaaacaaaaccagagactcaaagcaccaaaacccccaaaacaagccaaagcaacaacactacccctataaccgaatctacagtaggtaaagtagtgataaatcacacacagagccaggcaggatggtcgtgaacacctgcgactcctcactttggcgcaagggaatcgagagagttcgagaaccagtactgaccactagtgagactgtcacaaacaggaaactgtgaggaaatgtgaagatgtcaagtatgaccctgggggttggaaaggactattggtatggcagtctgtccatctcttttttctttctttctttttttttttttttctggagacaggattgttttatgtagattggcctggtctaagatccttttgcctcagcccaccaatttctaggattataagtgtgggccagccatacccagctgagaacagaggtttattgatttcttacctttttttagattaaataaacctcttcctttagggagccttattagtgagagatattaagtcgtaagtgttgcagagtaagacagagtagtgtttaagcagaaccccaaaggtgtggcaggcttttccctgtccaatcacaggccatctgttgccctaatagttaaactaattggacagggaagatcctgccacacaaaggagggtgtgactgtcatgcaagtagctggaagaagtgagctaagagcttgaggaggaaataagcaggatttttccctttggaaaaataacagtatgtagaaaattataaaaaagaaataacacacattcccatcacctagatttgtaattttaatattctgaagtattttctgtataaattcctttttaagaaattatttgaaatggggttgtgaacatcattatgacatttttatctgtatactatttgtcttctaacaataaagatcataattgtataatcaattccaaataattcccagatatatacctattatctagtccacacttaatgttattatttctgatgcacttggtttcaaaggctctttctttgttttgttttaaccaggacctagtcaaaattaatgtaatgtcattgggttttgtcttgctgatattttaaactaagaatcttttttctgtgtccctgactttgaattttgaagtgaccaggctggttgttttgtccatgatctgagcttgtttgtttgtttatgatgtctcctcacttatatctatggcgggccttttttaaactggaaatattacagcttgtcttagttgatgggagagatctggtctctgtatcagttgcaaattatagacttagaattttgtagtatgatagggctaaaatatactctggtattttaaaggaaaaaactgggtatttcacttttgagtaatattttatggttagtcactgatctttgatgacaacttctcaggtttaaccttggaaacattttgtttcttcaaaacaggagaagaaaaggttggtttgttatttaaattcttaacgtgttctcattttactgggggaaagggttttccaagctcagctgggcactggagcacctaacctttcttcagacagtgcgctatccagcacggtagggcttttgtaattaaggtttgagaatgtggagaggtctctcacagtctctctttaaacctgccactgtaaattggtctgatttttctcttcctgccccttcttctctaaagatttatgatattcagactggcaacaagctgttgactctgtttaacccagatcttgccaacaactacaagaggaactgtgccacctttaatcctacagatgatcttgtcttaaatgatggcgtcctctgggatgtccgctctgcacaggccatccacaagtttgacaagttcaacatgaatatcagtggtgttttccatccaaatgggctggaagtcatcatcaatacagagattgtatccttaacactcaagcctgactttccaagtgttacttgatttgttagcaaaaatatttcaatattgcttctcttttgttctgtagaaatcagttgctagacatgaggagaattgactgtaccattgggaattggaagagagctcatgtagtatttatgtgtgtgggattatttgcaggtacagcaatcagtaatacatgttggcatttaaactatcagtatctactaggaaggaaaagaagtgataattgagagtttacatgaggctagagaagaactttgtgggttgaggggatgcagtgcagagtgcttgccaagtatggtcactcttacccttataaaacaagatctctcaacttttgtataaagtagtttcccttaatgacacccctcctagtgggaccttcggactttccatcttttacacactgttcctgctctggatcaatgccgtgttgtttttaaccacactgggacagtgatgtatggaggtaataagcattgcccttcattctctttaccctgtcctacactgacacttacttggtattacacttttagaagttttcacttgtgaaaacaattgaaaaaagaacaaatagtgacaaaagagaagatgaacattttgttgatttaggctaaaaggctactaatttttttgtttgtttgtttgagacagggtctcaggtagcttagatcttgaattttgaattattttatttatttttaagtttagtatatctttgagttttcctgaatgcatgtttgtacatcatgttcatgcagtgcccatggaggctctgttgcctatcctctaggactggagttagttacccacagttgtgagctgccatgtgagtgctaggaatcgaatccaggtcctctgaaagagcagctggtgctcttaactgatgagccatctctctagctcctaaggctactaatttttaacacaacaaatttgtacagaaagaaattttatgcaataatttccacattgttatcttaaaaaccattgtatttgtttccttgggatattataaaacttcagccataatacttattgagagattgaagatactgtttgctgcagtgagttgggtatgtaattgaggatacctagagaagaactaataaatgtagaataaatttggaaggatacccattgaagtattgattgacctttgtagttccctcatttgtggatcagcagtatttctgattcttagtaaagtttcacgcttctgtctcccctgtgattagcaatgttgcaggcagatgatgaagatgacttactggaagagaggatgaaaagcccttttgggtcatcctttcgaacattcaacgcaactgattataaacctataggtaagtctgaatattgtttcttcatgtttttatatccttccttaaaatcctccatttttctagtaggacttcttattgacaagtactgaagttatagaaatatctatgattattgacccttaaatatatattttaagttatgtatatgtctgtatataggtatgctcatgtgaatgcaggtgcccacagaagccataggcatcagatctcctggaattggttataggtggttgtaaactacctagtatgggtgctgagaactgaacttgggtcctctgcaaggatgccctcttaactgctgagcagtctttctagtccttaatatgggcctataattaaatcctgtaaacaaatagcaggtttttaggtcacaggactaatttaattttcagtcatgttctatttttcagcaactattgatgtgaaacgaaacatctttgacctgtgcacagacaccaaagactgttatcttgctgtcattgaggtaagggaggcttgcagagactctcttcgtttgttctggtatttaaggtgacttttggcattttatctgataccaatgcattttaaagtaagtaatattcttgatgatagattattgataacttactcaattgataggggttgggatatgtgtagtccaagagaaacaatgagaaaaatccatttataaattcccagctcttggactcaagttgcttttccttcctctgaggagtctttgtctcatcagagtaaggtaaacttgttccagtggggtagtggcttctactttgcttataggtaccagtgcctaaactttactcttcttttttcccccactctgttctaggcataacattttgagtcagccaagtaattttggtattggaagctttgttggttatagctatggtcaagaaaaaggtcaatagttagctatagtgtggatgtggcctctgaccacggcttatttaagaatggttgttccattccagaatcaaggcagcatggatgcactgaatatggacacagtgtgcaggctctatgaagtgggcaggcagcgtctggcagaggatgaggatgaagaggaggaccaggtcagtgatctttgaattttctgttaaagctttgagaagcctgtgctctgctttttgttggaggggatttttaagataattcttctacatgttgccatatttggaagacctgttaatatgtctgaaacttaaagcgaaattttgttaatacagaacctttttttaaaaaaaatggatgtattatgacacttgtttttatttaaaaaattttaaaataaaaaggagatagggaagctactctgtcatcagtgcaaggttttaaacaagcaaaatgtgacagtgcacacccagtgtcttagtactcagggtgcccaggtggaagccttgtaagtcagcacagtgagtatttcaaggccagcctgagcctggtcagaccatatatcaaaagcacaaatctcacaccagaatggtaacaatagcaacaaaaaaatctaccgcccaatgacccatgttccatttacaaggtgcaatctaacaatctctgattttagttccatgcttgttatagtgtccatttggggcttcaagataagcagctcccgtagggtcagcacgatggctcgttggttaaaattgcttgctgtcaagtctgatgatctgaaatcagttccctggactcacatggaaaaaggagaaaaccagtttttctaagttgtctaagtcctctaacctccacatgtgtactgtcgcatgcactcccatgtgaacaatggtaacagaaaagatgagcagctctcatattccagtgtcattgtcatccagtcagtcacagctgctggagagtgtatgaacaggtaaagatcattgtgatggttttgagaaatttaagcataatatgacctgtttgtgatatacttatgtcccacagtgttagccttgcccttctcacaaggcaggtttatagtgtagatgcctgttgtattgggtcagttctgaagagcatccccaacttgagagcagcagcagcttttcctgatgctaactcatggcgttcttagcgcatactctctagtccacttcctctgtcctagtgctcagagcgtttgctgcagagctgatacagagtggaaatccaaggaccataatgagggcagtcaaataaccttttacagatcttaatttcttcacctggagtcatgattgtttgtaagggactttaaggtccttgggtgagatgtggcagaggatgagaagaactgtgccctctctagttgtattactgtggctcctgccctcatcactctcctgttgtgatagtcaggctctgtgctcagggctgatgaagtatctttctttactgcccatcccaaatagcatgtactttacatttacaagaatatttttaagtataatcttttttctctccctcccttttgtgcatgttctttctcttgtgaaactagagattgatgaacatatatatgttaaacacatcccagtctctcatccttttttaaactttgatataggggctaatcaagttgcccttggtttgttcaaacaacaacccttgtccccaaacaacaaaaccaaatcccaaagcagatttacaaaacaaacaatagtaccaaaaccacaaacaaacaaatccaaaagccagtagtttcttgagtgcagtgggcttaaggactcatttttttctaacagaccttagtactgcctaaacaaagatgttttcttgtgcagctttgaaattcaggtttgtgtttccctgctaggctttacagttagaagtgcattgtgcattgtctgctctctgaatgctaggcaagtactttaccattgagctggctgggatatatgtaactaactataaatctgaagcaaactcaggtgtattttaagttacttgtctaacatcgttatccctgccctgcgtatttttgaagtttataagggtccgggcagcagtgtgctttggagatcattccctgtgccagtgtggctgggtgtctgtctattcttcaaggtggaacttgaaaggaaactagaattgcccaagacactgggttattgtgttggcttcattctcgagtgtgtgggttagtgacaggcagaggcactgagggtagtgtgctggctttggaatcagactgtcagcttaatctaagtattgcactccttgcccaactgtttccagggagctcgtgttaggaaaaagaccactctcttctgcggttctgcttacctttactgtctaataataatatgagaaaggtgctgggatgaggacaggtcattggtaagggtttctgactttttggttctgaaggaaaaatagaagttacctcagcatggatgcgtgtccaaataggcagtctcggtgggccctggcaaggagctccggtgccccatgtgtagaagaatgtgaaagttttgtagctcggaggggctttgttgtgtgcatagtgtgtggcatgggttagtactgctttcaggctcctcagggtctaggctaagttcactgtgt

SEQ ID NO: 35313 - DNA, 1370 bp, Mus musculus
actgagtgaattcagaacacctgccctttgctgcctcccagggctgtcagttaaggaactgtatgccctgcattcagaggactatgatttaaagtctccctggaatctgagggcccttctaagaacaacaacaacagtgaccacacgaccacacacacacacacacacacacacacacacacacacacacacacacacacacacacacacacacacacacacacacacacagagctacagggactaggccctagtttgtgtccccctcctcctaggaagggcatagctttcctcaagggaaaaacaaacatgtctctgggtatttcacaatatattttctttgtataatgttctttacttaaaagaacaagaaatagttttttataaaacttaaaaagaaaaaaaaaagtaccaggcatttctaacgagggtctgaacttatccaccagtctcctatccccgcacttcattttctttggaagaaaatgatgtctaaagaacatatagaggcatttttacatacgtatttaaatgaagaggaaaatcgtggtttcataaattgataaggattaagaatattttattataaatataatatatgatttttaacctgttttgttgcctcatatgctgtcaagttaatttgttttcctttgtgccagagcgggaatgggcggcatggcctgagcactgggaatgcctaactccctgcctcggtggccaggcagcagtcagtcgtgtggaccctggttttgtggagttgagagaactttaggggtataaattcactccctctctttcctctttgtgattcagtttttcaagcctttttttttttccctttccctttctccccaatgtggaaattacaaatcaaaggtctttttctttaatgtaaagtgtatttatttaaaaaaaattacaaaataaactacaagtctgtctttgtttatggcctttccttgttttcttttaccaaagtgggatttccccttcctcctctcagttctggccagacctcagaggacttgtaaggaaggcagagccctccctccacagtgagagaacaccgcctcccacagcaaacccctgggacagacggtggctctggcacttgagcctggcctgaagttgctgaaggctttgtgaggataacaaacaagggggcagaagggaccggggtagggggtacatctctacccccatgtgtgggacttttaaggagcattctggctaccccttgtctgagattaggggggacttggacagtttttcagtcctaacagttcaggggtactttgaggcttggtcaggctggatttggagaaaaactggcaaggtctaaaactgacaaagcatcaggggctcat

SEQ ID NO: 35314 - DNA, 3069 bp, Mus musculus
ttataagaagaaacttatgtttcccgtgtatgagattctgtctgctgtattctgtatttttttatattttattttatttttttgactaactgtatggaaaattgtcagtaaagcctttgtcagaggatgaatttttaatcccgccagagtcctggtttaatcaggttttttcgtaaagaatggaaggcttcactcagagcatgccgtatgtcatgtttttgtcaccactgcttctaaaagttgtgctgtgctggtcctgcgcagctctttgtgctatcggggcccagctcacacttgtcaaacttagctgctggccagcaggcttacaaggcatggtccctgtttatactagccgaaagctgagcccgttcagaggaaaggcctgggcctaagacctgtgccaacagctacaggtagttttgttgtttttccctgccctaagtgtgtgctttagtttgggcgatggctgttggacagagcacccaattataaaagcctgtttaatggagggtagttttcagttgtgtagtcttgcatttggggggaggaacagtgcaatattgatgcaaacggccgtgggcatgacgtgcccaggctccccctggttccgtcttttagtcttactgtgtagtttagggtctcccctatcagtcatctgcctgactgccaggggtcttggaggtaagatgttggcaggcagggtaagcggcagccagacttgttaactcttcaatgtgcttccttcgctctcagggctatgtcagagcagcctgtgctgcagtcaaacttcaagctttgtggcaaacagaccccccaactacactgctcagtctgcaagggtgtcagtgccaggaagatgcccttgatgagtgacatagtgttccgtgttgtgacccagacctgaggtaagaaaatagagaaaagtcacagttgtgatggactagagcccaaatccacatcagctttggtatgaaggaaccagactgataagtcctatgtctgggatgggaaagtgactaggccctgcctttgtggtctctcaagtagaaagccagatcaggcaacaacggttgtcaccacagatcacagtcaggctcacaatgtgacggcttggtagtccaaaccagtcaggctgaggagaatggaaccctggttagaggttctagccaggccagtgcttcaggtctggcctaccctgagccagcacctgtgacccctgggctctgagatggaccttgaaggctgtatggagttcatgcctgtctacagagacagaaatttaagagactggagaagaacagggaattaccactcactgggctttggctggtattcatgagaaagtaaaggctctaaagcagtggctctccacctgtgggtcacaacccattcggcaaacttctatcctccaaaatatctgcattacaatttgtaacagtagcaaagttacagttatgaagtagcaacaaaataacatggttggagtaaccacaacatgaggaagtgtattaaagggttgcagcactaggaaggctgagaaccacttctctaaagcattaacatgcgtgttcatctccctatgtatggggccactttctctggagctcggagcaagccagtcaacctgctagactagactacttcagttctttgtcataccagcagaaaccagagctcatcctgacagactgctgcagtttttcttacagatcctgaacaatgaaaagcatcacagaagagttgttgtagcacagctgggtccctgtaacaaagcaggtttcacccgggtacccttcccaggcagaaccaggtcactttattacccctttggaaaagggcaccctttggctctggcgatcatctgtttcttagtgaagaaccacacccactgtaaccttcttccttgggccatcttacccacttccttttagtccttaagatgttaacaggttctgtggcctctcagtcagccctgctagcactagaggtgggtcaggcggccaaggccttgtttgatcatgacattgtagccagtgagaaagctgacagcaggtacccagtgcctgagatgttgcatcaaggcaaaaaacatgagcagagaaagcccctaattggaaggtttcatagcttgtcttaagtgactcgggttgtgaaccctaggaagaacatggaaggtggatgttttctcctagcctcatgaggcacattcctaagggagtgttgtcaagtcaaccaaaattgtgctttcctattatatgtgctcatctctaccttgggaggactgcgtgctcccaggagctcctggcagagctgcaacacagagactttgctgttttctcttcagctgcatccaggagcagccatcagccttctactggctggtgtcagctaaccatttaatgccatggcatgaagcaaatgagcggctgagccttggcttgcttaaagtaccaggatgtacttctttggtactgggtcccttcagtgtaacaggctgtgttcttggtgtaggaggctctccctacccctggagagttttcactgtctgtgttacttgtttactttataaccagtacacccttctctcagcaaagggagtagggtttctgtagctgtgatgcctatgtaacagaaacagaagctacaatctgggcaaaatcagagagaaaattaactttgtatttatttgggaaggagagaggcaggctgagcaaagcatgagcccctgatgctttgtcagttttagaccttgccagtttttctccaaatccagcctgaccaagcctcaaagtacccctgaactgttaggactgaaaaactgtccaagtcccccctaatctcagacaaggggtagccagaatgctccttaaaagtcccacacatgggggtagagatgtaccccctaccccggtcccttctgcccccttgtttgttatcctcacaaagccttcagcaacttcaggccaggctcaagtgccagagccaccgtctgtcccaggggtttgctgtgggaggcggtgttctctcactgtggagggagggctctgccttccttacaagtcctctgag

SEQ ID NO: 35315 - DNA, 1743 bp, Mus musculus
gcccgccgaccccctgggctatctgcccctgcacggtggctaccagtacaagcagcgctcgctgtctccggtagccgccccgcccctgcgggagccccgcgcgcggcacgccgccgcagccttcgccctggatgctgctgccgcggcggccgtgggactgtctcgagagcgagccctggactattacgggctgtacgacgaccgcggccgcccgtacggctaccaggccgtgtgcgaggaggacctgatgccggaggatgatcagagagccactcgaaacctcttcatcggcaacctggaccacagtgtttctgaggtggagcttcgacgggccttcgagaagtacggcatcatcgaggaggtggtcatcaagaggcctgcccgcggccagggtggtgcctatgccttcctcaagtttcagaatctggacatggcacacagggcgaaggtggctatgtctggccgggtgattggcagaaaccccataaagataggctacggcaaggctaaccccaccacccgcctctgggtgggtggtctcggacctaacacctcgctggcggccctggccagggaattcgatcgcttcgggagcattcggaccatcgatcacgtcaaaggagacagctttgcctacatccagtacgagagcctggacgcagcccaggctgcctgtgctaaaatgaggggcttccccttgggtggtccagatcgcaggctccgggtggattttgccaaagccgaggagactcgctatccccagcagtaccagccctcacctctccctgtgcactatgagctgctcactgacggatatacccggcatcggaacttggatgctgaccttagggtgcgggataggacccctccacaccttctgtattcagaccgagaccggacctttttggaaggggactggaccagcctcagtaaaagttcagaccgcagaaacagcctggagggctatagccgctcagttcgcagccggagtggtgagcgctgggggggtgatggggaccggagcatagccaagccctgggaagagagacgcaagcggaggagcctctccagtgaccgtgggaggacaactcactccccttacgaggaacgcagcaggaccaagggtggggggcagcagtctgagcgaggctcagatcgcacccctgagcgtagccgcaaggagaaccactccagtgaagggaccaaggagtcaggcagcaactccctcagcaacagcagacatggtgctgaggagaggagccaccatcaccaccaccatgaggctccagactcttcccatgggaaaaagactagagagagtgaacgcaatcatcggaccactgaggcagagcccaagactcttgaagagccaaaacacgagaccaaaaagctaaagactctgtcagaatatgcccagacactgcagctgggttggaatgggcttctggtgttgaaaaacagctgctttccgacatctatgcacatccttgagggggaccagggagttatcagtggcctcctcaaagaccatccttctggcagcaagctgacccagctaaagattgcccagcgccttcgactggatcagcccaagctggacgaggtcacccggcgaatcaagcaggggagccctaatggctatgctgtgctcctggccatccagtcaacccccagcgggcctggcgccgagggcatgcccgtggtggagccaggcctacagaggcggcttctcaggaacctagt

SEQ ID NO: 35316 - DNA, 1218 bp, Mus musculus
tgctcagcctggagctgtcctttgtgctggcatgtaggaagccctcggggaactggagctatgttccttctctaaaccacataggctgtctgcactgtgtgtcttatggtggctactgacagcctgaggtggccttcctggtgaagactgtcatctcaatcttgggcgcagtgtgcatttgtcttcccggccgcacgtagggctggacatcctaaggatggtttgacgtgcagcacagttgggcctgcagcctctcctgcccagccatttactctcctgctctccctgcagacaagcagattgacctgagcacagtggacctgaagaagctccgggtgaaagagctgaagaagatcctggacgactggggggagatgtgcaaaggctgtgcagaaaagtctgactatatccggaagataaatgaactgatgcctaaatacgcccccaaggcagccagcgcacggactgatctgtagtctgcccaattcctgctgcacctgaaggggaaaaagcagtttatctgtctcttccccaaataaccattttgtaatttattttttaagcgggctcctgacaatgagatgtgaacctagagctttcctagtgatgctggctctgcagttccctcttgcccatccccgagtggggacaatttccccatccccaagtggggacaatttacttccttctttgctggtttactctaggacttcaaagtttgtctgggatttttttattaaaaaaaattgtctttggagagttgagctggcacagtattctgtcctatagattactggtttatctttccagtctgaaaagatccctcagcctgccagtgctgagggcctgaaactcccataacaggacttaagagcttgggcagccaatgtcttgtgggtttgggcttctgggtgtctgatacttcagcctggtgaggttagacttgacccctgacccccacccccatccagtccagtagcaggggctgaaggttcttgagctgctgttaagtctaaaggacatttacatttggctcagcctatgcagaaggagaactgtgagctgagtacaggtggtcagaccatagcgtatctttaccccgcctggtacttaaactattcattcatcggggttccagtctagcatcagaacaaggacccttgcttacctatatttttggcaaagttggcaggaatcggtttacaaagaagcagtgtg

SEQ ID NO: 35317 - DNA, 1213 bp, Mus musculus
ggtgtgattggaaccagaagtagttggctaggtgccccgagatggccagggccaagtcaaggtcaaggaccctggcggagcatcagcctcttgtagctttaatttccatggtagtctctcatcggaactctaactctgcagctgagcatatatcaagtgcctcgggcctgggacagctagatctgggcagactaacaaaccgaagccttggcaaagagaggttttcaaggtgacctaacagttgtctggaactggagagttggttatgaatgtgtgctgctcttgtggaggacctgagttcaattccagcatccacagcaccctgcactgcagctccagggaacctgatgccttctggcctctgacacatgctctcatgcatgcagatttttttcaaggctttcattttgttttgttttggtttttgctgcagtgctactacattggagccacagatgatgctgccaccaagatcatcaatgaggtgtcgaagcccctggcccaccatatccctgtggaaaagatctgtgagaagctgaagaagaaagacagccagatctgtgaactaaaatacggtgagtgtgactcggaccctgtgccttctaccatctctgcataccctttctggacttaactttctagccagaagagtcatcaaaagcgggtttgtagcataaaggatgattctctgtgctgcagggaacagacttgcgcatcgaacataggtggaggtcaaagggtgacttaacatactttgaaggatgagggttgacccagaggccatctgatagagcagtgcagatagagattatagatagtggtggagtacgtagaggtcaagttggacagagccttggggggaaatttggcttttagtctaaaaacttgggagctttagaagtttttgagcagagaagtgatgtggtgggaacttgagttcaacagtcatggctctaaaccccaggcgtgacagttacagcatcaccatggcagagcccatctggttgcacagaatcctagtctcgagaagagctaggcctctcctataaagtttaaacgatgccagtgtttactgcactaatgttcgggaattttgtacttgtgtgaatttgatttggtatcctggttggttctggtgtcggtttgtttgggtcacgtgggttatggagtaagtgtctgactctggtgcctcttggggaggctaggggtgtgt

SEQ ID NO: 35318 - DNA, 1128 bp, Mus musculus
tgttaagtagggcacagtggtgactttatagggaattctttcatgtcagggcactgacgttactcttggtattatggtgggggtatggtaatatttcaccagggtgcttctaagttactttttaaaataacttgtcttgaggcaattgttttccttttatttgcttacattcccatcagtgatggccataaaactgccttctccttgatgagcaggtatgttgctcccctgttcccttaactagttggccttctggcctgctatggccaagttctggccccagctgcttatcccttctccacaattctttccaaacagaaaaacccatggtcacagtgtttttctcttagaaacaagtttaatagaactgtcagcaaataacctataggaaaagaaagaaggcccatttccgttcacagtatgttggggcccaggtaccaacagtgtagggctttctgataccctcaggatcattcaggcagagtggagactgttgaggatgtaggtaggccaatccaatagccccagcaccaagggcacacacacctgttcctgagcccagactcactggtaagcttgtttctggaccgtctgggttcacaggtatgagggtcaagtctagcttgggatgtgattcttaggtagggcagctttaggtttgtttccaggcacgtctgaacctcagtccacggaggcagccagtcatcacatgcagacatctcctttctccacttgatggcacaggaggtagggaggggaatgtagggttaagttccttgaccttgctttatgcaaagtgaaatatatttgtgttacttctctccattttccccaactggatgaaatggacctattctgaatactttttattgaaaaaccagccagtgtgagggaaatgggaggtcagagatcagaatcctttgaaaagattgtgaaatactgattttcattgtttaaagcgtatttgtaaatacctatttgaatgctgtgtatttgtacaggaatttgagcaaaaaaatgtatagagtatgtctaattggtaataagccctataaatgtgtttttaacctctggcattctgtgcttatttaaaacaagaaaacttctaaccatttcttttgtgtattc

SEQ ID NO: 35319 - DNA, 1174 bp, Mus musculus
ttggtcttcctgtggggtctcccttctcctcagcttcttccaccctttccctaattcaaccacaggagtcccaaacttcagtccattgtttgggtgtaagtatctgcttctgtctcagtcagctgcttgttgggcttctcagaggacagccatgctaggttcctattagcatactatagcatcagtaatatgtcaggcctgggagcctccctttgagatggatcccaatttgggctggtcactggaccacctttccctcagtcgcctctccaattttgttcttgcagttctggggtccccggttcacttagccacagggctccagctattcagtgcttcaggtaggtacatgggagttttgactgcacttacccaacacaggtgcccagtgagtgtcggctatgggaaggtatgaaacaccgctcggggtgggggagtgtagtctgaggtcctggggactgccagagctggcttgggggtctctgggcctgcgatgaggcccggggtggggtgcatctggttctcaggctctcgggcacccagttactgctgggaactgcaaaagagctgagaactgagtgggtacctgagggctggactgggtccctcatgactgggtgtacagagaggccttctactgggagattagactgcggctctataggcgaggtatggctccccacagaggatccagatgaaaagaggcagtccatggttttaaggcatttattgtcatgttggaaagtgtataagtaaaaccataccccacttctcagggcgggcttgaggttaaataccttttgcagggaggagtgtctgggtaggagagtttattggctaggtctatcaggcctttaggtgcctcattaagatggagatctggcttgagcctacaagtcatatcttctacctgtggaggggcttgggacattgcccttacatgagtgatggccataaatctatggagggctgcagcctcctgtcaggagcctagtgtcctgaaccaggcaaaacacctgccatctctttagggtcacctgggtttctaaccttagctcaaccaggaaccaggctgcctttcatggttctacacagttcttttagatagcaaccattctgggtcagagtttttgactgtgggatggcaatcccgtccctgaacttgatgccctgt

SEQ ID NO: 35320 - DNA, 1928 bp, Mus musculus
gtgatggcttttaaggtccatccatgctgaccttttctctctgttatgctaatggtatgcaggaagagatgaccagtgccctggccactatgcgggtagactatgaccaggtgaagatcaaggacctgaagacctctaacaaccggctcctcaacaagaggaggaaaaagcaggcaggcagctcctcagcctcacaaggatgcaacaaccagtaactcatggtgccttggagaagccaggctgacagactgtaatgtcctgaggctctggccaggaggggctggagtcgttcttataacaaaaggacaattttgttgtcttatgtgtcacattgaacttggggataaagagcttggcccaagaatcccagcctaagtctcaggctctagcaagctgcaggtgacagggatgggagccctctgcgacagctggagcaactttgcacaccagcttgactgaggccacagctctgttctgcctcaggaagcagccttacttctaggccactgggtgttgtggcggatatacccgtttttctataaaggatgtgtcctgctgtgtgggcagatgggtctggccttgaggaaggtattgggccattggttgctatggtgaccagaggccatgttgctgtctgagaatactgaacacaggaggaaggagggacaatcaagggtctaccttcttggggaggtctgtctctctcacactggatgtccctccccaggctctctcctctggtctgctagaggctgcagagtcctgattgcttgctttcctgggtggtccagccctgccttactgtagcaagagcccatgtaacactcagagagccactagagtccctgggccaagcatcctctccattaccccctgatccaaaaggtaacttctcatctcaactgaaggtgtggatatgtatgttgggggtgggtatccttaacctttttccagtttggaaacctcactgtgacaaaagcccccacctcttcctgctcaccagatctcaggtaggaaagccagtctctgctgacagcacgggatctcaggtaggaaagtccgtctctgctgacagcacgggcaaccttgggacttacttttgtgaaaggtcgcacttggctccctgtttgttatctaggaccttttctggtactctggatcagacctggctggtgaagggctgctgagccgtgcttacaaggtctggtcctggctttagcagaattggagcagagagggttttccttggctgatcccagacttagccagctctgccctgtcctgcccagggcagcatccaggtgctgagtggttgattggtgacctgacaagtgcctggcacccagcctacttcctagatcctagatcctggcccttctcactggctgggaaaccttagatcttatcaattacaatgctgctgggttttatattctgatatcaataaacacatttttaacatttttcaatgattcctgggtttctttatgtctacctagttggtcaaagtgctcaaaggacaactctacacccctactggtgactttagcctgcctggagagggtgcctctgacttggtaaacatgctaggcagactccaacacctctgtctcattcattgtagaaaggtcagaaggaccgagagatggcagctgccgcatgcctccagctctgtgccgcccctgtgcactgtgtgtgtgacacccacccccggctctgtgtgtgccagcgtctgcccacagtggccacccccagctgcgtgccagcctgctgaagggcgggcagagcgcctgctgcagcgccgagctattttcagaagctgccaggtttcatttggcagtgagaatatcggcgaggggaggggtagtatgctggaagactatcttttcattactccagcaagagagcaccctcaccccttgggagcc

SEQ ID NO: 35321 - DNA, 1099 bp, Mus musculus
tgtccccatctgccaaccccatctgtgctttgcagcgaggaagatttcttctgtgtagctcctggggtctgagttgggggcacatgcttccctgaacagcctcaagtgggcctggcctgctgactttgtgggcttgcttctgggcttggtgatattggctcatgagcatctgctttctactccagcatctttctggcctttcatggtattcaccccaactcagggacagaagtttctgcccaggggctttctatggcacctgatcattcatggtcttgtctgagcacctgcctcacttttctctctgtgaaggtatctgttccacgttgttagtgatccagagctttccataaaacagagctggcttatcatatatagggatggaggcatggaatctggaggaggggactctgtccactcctggtaccttcctctatactaatgctttctttctcttctggatacagcctgaaaacctactctatacatccaaggagaaggatgctgtacttaaactcaccgattttggctttgccaaggaaaccacccaaaatgccctccagacaccctgctacactccctattatgtgggtgagtcttttgcatgtggcttgcatccccattgctgtagaatgctataggatggttagccagagggttgtggaaaccaaagagttaaagcctggtgaagagggaggagggagcagagggaggagggagcactcttgtctgcatggaggcgggtgatggggggggggctggaggctgcaaaaatattcttccaaacttcagcttctgcttttgaaaatagatccaggaaaattctggctgtggcctgtgagctgaatgacgtcacagcagctctaaatatatatgtgataaaaggctgccatcagctcgggacggagcccagccgcagttgtttttctccggttttcatcttcatattcagaaagtgggcaggccttttctcctacattagagggatgcagggtactagtaactgccttgtgggaaagggtcccttgagccaggaattagatggggctagggggcatccacatacttaatgattcctgggaaagctcctggcaggctc

SEQ ID NO: 35322 - DNA, 1155 bp, Mus musculus
tccttcgctgcctctcgccacctctgagcgacccacacacacacatcatacccccgccttggcctcctagcctttcgctcaccctcccattccacattccccaatctagagccttggccactctctcctgaaggacctgggtcccttcccccggagcctgtgccttggggcaggggaaccccaaagtaaggtgccatggtgtttggcactcaagatttagctcacccttgaactgtccaagtgcccgcagtccctagactcatccccgtgggctaggacaggaggccactagtactgatgccaaaccaggcctccaccgacccacctgcctggagatttcctctatgtaggcaaccctgccactgctgggcacctctaactggccctttggccccacccaagcccaaacttaccttctctgggggaaaaaaaaggaaagatggtaatagtgagagattcggggggcaccccctccccattggtttctggccctttcaggctacaaccccccagccttgcaggtgtcagaacagtctcacaatgacatcagtttagacacatgccatatacacttggatctctgagagcagaaacccaactctcactagacatacctgtgatggaacacacaaacagacacgcaccatggggggtggcccacaaagccttacacaaggcgagatgtcaatgaaggggttggcctgtgtgttccatctctgctcacctctgcctctactctgagatgcagcctggctgatcctcccatctctaaaactgaatgtcaaaccgtgccaaatgctggggggggggggagacctctctgtttcacccctagccaccagtgtccccaagtgcccctcaccctgccaggtgctcattgtaaccatcgttcaccagtgtccggcccctagtaggaccacacatcactgcctgaactcctttggcagaagaaccccaccagacattgagacattgtattttgccttagcagggatgagttggtctctcctggctgggccatcccatccccaatctggttcttgcacactcaggcctaattccctctgcacacacacacacacacacacacacacacacacacacacacacacacagtccctgcccctaggaggccaaattacccctcccttgctg

SEQ ID NO: 35323 - DNA, 1142 bp, Mus musculus
ggctcttagacgcggcacggggatgggaaacgtgggatttggaggcaaacctctttggtaggaggatttggccttattgaagaaggttgcagagtatgttggtctcccaaacccagtgtaacctgccttttctcttctggctccaggcaactagccctaaaggctctcaatgagcggctgaagagagtggaggatcagtcagcctggcccagcatggatgatgacgaagaggaagctggggcaaaaacggacagtcctctgcccttagaagaagcttccacgcccccagggaaggtgaccgtcccggaatccagtctcatcaccttggagacagctcccctactctagaccactttgagtgcagttcttctactcccatgccttcccgatccgtctcggctactgcagagcactgactgctctgaggagagggaagagggtctgctgggggttcctgtggccttccgctgtgtctggacaacactaacacaggacccttgttgctacctggttctgactccagacaaccacaatgccaggtacggggtctctgagcagcagccagtgcagatccccatttgcagtaagattgtacctcagcggtacaattcctcaccaaggaagtggctgcagggacactggtgccacggctcctgggccagcccttatgtctgaaactggttgccaacagccccgagccaaggcaaggatttgtgtttgccaaaaatgttctggggacccagccagtgtgggtctgaacatccccgcccacccccagactgcattctcatcagggtttcttgtgcccttctgctgtggcagtgacaactgtgcctagccggggctgccacagctcccaggtattttctacaggaccatctgagcgggcagccaaacctgcttcacagtatcaataaagcggttctttgaggtctggctcctgggctccgtcagaccaccttgtgcagccctctcatctttatcagatgcaaagttaaatgtgttttctgggttctagggctcagttccatgacacctccacctggctaagaatcccactgcccatacctcttgtctattaatacacacctgctgctgggcagtcttgcctgagccatcaccttagtccctttctccttttc

SEQ ID NO: 35324 - DNA, 1147 bp, Mus musculus
cacactggccctagtgctggaggtagcatgggccggggagcttaagcccacagcgccgcccatcttcactggccgaccctttgtggtagcatggaacgtgcccacacaagaatgtgccccacgccacaaagtgccactggaccttagggccttcgatgtgaaggctacaccgaatgagggttttttcaaccagaatatcaccaccttctactacgaccgtctaggcctgtatccacgttttgatgcagccgggacatctgtgcatggcggtgtgcctcagaacggcagcctctgtgcacacctgcccatgctgaaggaatctgtggaacgctacatccagacccaggagcctggggggctggcagtcattgactgggaggaatggcggcctgtatgggttcgaaactggcaggagaaagatgtttaccgacagtcttcacgccagctggtggccagtcggcaccctgactggccatcagacagagtaatgaagcaggcccagtacgagtttgagttcgccgctcggcagttcatgttgaacactctccgttacgtcaaggcagtcagaccccagcacctgtggggcttctacctctttcctgactgctacaatcacgattatgtacagaactgggagagctacacgggccgctgtcccgatgtggaggtggcacggaacgaccagctggcctggctctgggctgagagcacggctctctttccctctgtgtacctggacgagacactggcgtcctccgtacacagccgcaactttgtcagtttccgtgttcgggaggcccttcgagtggctcacacccaccatgccaaccacgccctccccgtgtacgtcttcacgcgtcccacatacacccgaggactcacgggactgagccaggtacgtgttctcccttcctccgggagccactgcatgcttgtgttatcggggaccagaagtactgttccatatctgttttagtcttgtggaagggtgatgtcacccccattctgtagataagaccgaggcccagagatgctgagaggtagccaggagcctgtagcaagtccatgaaaagtgcacagaactaaaccaggcatcctgactttggggtcagaatgtgtaacctttgactttgtgggttcatgcgtg

SEQ ID NO: 35325 - DNA, 1494 bp, Mus musculus
gcaggacgtggatcatcccggaattcggctttaacatgtcagtatcaccctcacttctcacatgctgcccgtttatccaccctgcgcctgtggtccccaaagttacagtgtcgctcaagtcttcccagtgtttccctttcccttagagcttagtgcttgttaagccacacccaccataatcgagctttcaaaacccccactcccaaaagatccatggcccatggcccacaaggggtaagtgcagactctccctgaagacccgaagcttcgctccacttacagtggtggggtccgcaatgaaggggttaaacctgtctggggggggaaccctggcgctctgagctaggggcggaccctaaggttcctccttcctggccttacttagaaggtgtgggagctggggagggagtactgtgtctgcggagccacctgagccaggtaagaggcttaaagcctggtgtttgagatttggggggaaggggggagagggctgtcctcaggctcagggaaatttgggaaagggagtcaggaggcccgtcctacagtaaatgagtaaaggagtgggacccactgtccatccactgcaagaaatcccccaacatagaccctcctgccagcagatcctagaataaggcaggtaaacaatggagtttctagctggagcattatggtctacacctttcatcccagcactagaggcaaagacaggcagatctttgttgcctacaagtgagttccaggtcagccaggtcagttacacatagaaaccctgtctcaaaaaaacaaacaaacaaaaaaaccaaaaaaaaaaaaaaaaaaaaaacagtgcagtggagtttcagcagggaggcccaggtccccaaagtagtggccgttggacacctgtagatttaggaaggaagccatggtccttatcagggtgactatgaaactcagaccagaggcaagcagacttgcaaaagccacattctatgtaatgggccaagctccacggcagtaccatcagagccccatgtgtagggacagaaggacccaaggccaaagtgtcctgaattggacggattggaacggagggccacaggttccgtgtcccgaggagggaaagcagtaaggggttgggggggttgagcctgtttggggtgggtgtgagtgtcccaggagccacttttgtggctcagataactgaaaaagctcagggttggaggagagctgacctgtctgtatagggggaggaggggtgtgggaggtgggggtgactcctgggagaggtcttctgaaaaactcaggtgggggcaagctaaaagtatgatggctggtttgcactgtctgccaaggccagcaagctacagtcatgggctactaggaggctgaggcacttaagtcactattttgaggcaaacacaggctatacataccctggagaagtgggggggacggggagagggaacccaagcaaaacaaaaaatggtgagcaagtgggctagggtggcaagc

SEQ ID NO: 35326 - DNA, 1494 bp, Mus musculus; identical to SEQ ID NO: 35325

SEQ ID NO: 35327 - DNA, 1548 bp, Mus musculus
tatacacacacctgtcccaggcatggcagccaatcccagtcatgggccctctcctctacagggtggtgaatgtgaggaggagacagtccgcttcggactggaagtgctctacatagacagctgggctcgccaccgcatctacacagccttcaaagatgtgttgggctctggcatacactatcacctccaggtgaggggacacggggagggccacctagcctgactgcttcagactggccgtagctaattgccttgttttcagaacaatgagcttctccgtgacatctttggcctgggccccgtgctagtgttggatgctgctgccctgaaggcctgcaagatttcacgctttgaaaaggtttgccccttggacacctttatcttgccttctgttacccaggggcatagctctgcaagtaggctctcggttcaccgtgctcccttctttgcctctttgacagcacctgtacaatgctgcagccttcaaagcccggaccaaggcccgtagtcgtgcaagggacaagcgggcagatatcttgtgaatcagactggccaacgagaaggctacccataccataccatatttttaacagaagacagtgcaagaactggtccctgccagtgattgtcactttatttttttaatgatgaaaccaaaaatagacaaatgtgggagggtcaagggatcaggacacttagactcaagccctttgtatgtgcactcagctctgtggctgtggcctcttcctgtcctgtctcaggtaaaaccaaatgtgtgccggtcctggagggctaacggtcctagaggactaacctaggaccaacgggcagggtgggtggtgagaaaggaccatccctgttttatagaccttgccccactcccccacccccacccccgaccggggctgcttcccttgggggtctggcacctggcctccatggcatagggtaggcaaagctgcctataatggatgtgtgtgctggtttattaaagataagagagaattaaacgatacttagccccctgtggcctttatcctgagtcttgccttccctccctccctccctccttgtctcccaccccaggcttgtctgcagctaagatctctacctcacctttgtcctccatggcaggacacttagttccccaggtcagcgctgagagctgagactggaccccccactgggaggcctggcagagtgggtggctgagccagggcagctatttctagacttctgaacctcctatctgggggtggccagagggtgctgacaggaggtgccaggaaaagactggtgccccatcctctgacctttggctatccaaagcagggccctggcaccagaaggcttggtcaggcctggcctgaagaggtcaagagagacaggaagctgtggagttctatcaggcttgtacagaaatctcaccaaggagtagtgtaaatgaagccatcagtgagagaacagagacctgctaaaagcctctttccccctccccacagtctcacatacagatggcatctcagctgggtgcccgagcctcactgg

SEQ ID NO: 35328 - DNA, 1343 bp, Mus musculus
gtcccctccctcggctctagacttgggggaggggttgccacaggcctcccagtctaaaacccacctttgtctgaggtgccgggagtagccatggtacccccttcctgggcatccgttcgggttttctaaccgttgtcttgttctggggtgagcggggagcgcatgcagagatcccaaggcctatgtctggagggtaccaactcctccagcctagacccctggctttgtccaacaccagccctgacccaagtccaaatgtttacagggagcctcctgcctaccccactctctgccgctcggaggccccaaaggaaaaagcacaagaagcgtgagagataccgccattcctggagacaaagcccacctgctcattctcgtagctttaaagaaaaagaaaaaggaaaaataaggaaaactgcaaatctagaaaactttttagagaaacctatttaaaactgtcaggtcctgaccagcacccccaccccagcccagccccagccccacccctttccagcgattccgtgccttgagtgtgtctgcgtgtttacacccatccctctttgggcggccccctgctctgccctccacggaattggattccaagggctgttccagacaactgccaacgtcactgagggccctgctctgaagccctgggccctggctccattaacctaaatgtagctccttagcgctaatctaggaaccgccgctgcctgctgagggccaggcccctcacgccctcgccccaggcccgggtcctccagcgttgaacacttccttgcttttttcacatgttttatggaattgttcacatgatttgaaataataaaatgtagaaagaaaacaccaaaaacttccgtgttcttttctcctggggactgagcaagaagaagatatcccacaccttagtgccacacctgggatgggcccctggacatcagctttctaggcagagttccatcccagttctctagctttagtttgccctctggactggtcaacttacatgttagaggctatgcagccttctagtcctaattttgcagtttgtggcctggggcagccttcagaccttctgaaccttgggaactcttctagagggttcttgaaagttcggaggagcagagatagcacagataagtaggctgcactccttggcttaacagactcagaaaactaggggtggtggcatatgcatttaattgtagcctacaagaaggtgaggcaggagattgaccaagagttctagaccagcctgggctatatattgaaactcaaaaaaaccaagttgcgggctggtgagatggctcagtgggtaagagcagcggactgctcttccg

SEQ ID NO: 35329 - DNA, 1101 bp, Mus musculus
tgtttgaagaaaagatcacacagagctccctgaccatctgtttccctgagtacacgggtactctttgaagactagctcatgggggtgtggggtggccatcccaatagacaccactggggctctggtggcccatggatgccccaatctggacagaaggaaaaacacaggacctgtgggacctcactcaggaatgcactgtgtctacacacaaaaggcttgttaccacccatgggcctctaccgttgagcatacgtacataggaaacatccttcatacagcacacgcacttacacatgaccgtgctgtgcacattacatgcttgtctgttgtgggcacagagttctgctgtacatgcacatacacaagtcttcattcgtcttccttaggggccaacaagtacgacgaggcagccagctacatccagagcaagtttgaggatctaaataagcgcaaagacaccaaggagatctacacgcacttcacgtgcgccaccgacaccaagaacgtgcagtttgtgttcgatgccgtcactgacgtcatcatcaagaacaacctgaaggactgtggcctcttctgaggggcagtggacctggcaggatggtgagtcagggggttgtcaaacaacaggggtctggggaattgggggaagtcatttgggagtactcagcctggagagaaagggtcaggcagggcagtcagggaccagaggagagggaataaaaaagggtcctggcactctcctggacagagctagaggggtggtcagtgttctttggaaggagttgcttccttgcctccatggtattctagcctaatctagatgcaggagacccaggcaccccgctgctcactgaccaggttcactcttgttcttagacttctgtctctcagacctgagagtcctaggcccaggccagccccactggccctggcgtacattcagtgaccgcagtgtcactgatatacacatcctgtaacccagcaacagaagctggcctctgggcacagctgtgtccctggtaacaaggaggtgggggagaagaaggtcattgtttagagaggcaagaagaggagccacatgtaacccaggctgtgtctgtc

SEQ ID NO: 35330 - DNA, 1170 bp, Mus musculus
taagtccctagcactgtataaaactgggaattgtttgtgcctttaatgtcagtacacagaaggtggagatcagaaacgagttggaggtcatccttagggttacagcaggttccaaattaacctttgctacatgaggctgccatagaaaaaagagcttgctttaagttttttcccacgactataaaatataaagtcttaagagtcaaatcttttctttgcccaaaggtacagactttgcttctcttactttcttagccatagtatggagtgtaaaagttttgggttttttgagtcaaggtttctctgtgttgtcatggctgtcctagaactcactatgtagaccaggctggcctcgaacttacatcccatgtagaggattcatgagtttgaggccaccatttaaactaaataacaaaaccctactcctctcacacacaccccaacccccaaaaagagagacagaaacagcttacagtgttacggctaacacgaacagttgtgctggcgctctgcctaacctttctgtttatcaccaggcaccacagtgactaccacctcagcagctgtagtatcccaaagtccccaactctataatcagacctccaacccacctggctctccggtaatcttttgctcttaaatacagaattgataactttgttgctatgttgctattaatctttcctggtgtgtgagccaggattgactaattacatacattttacccaatttctttattaggctttttaaaattattgtatgtatgtgcatgcgttttaaatataaagtatcaagcaggtcatagttatactttgtaaatgcttccgcttgacttatagaaagttgtcagcatgttttttgctatagagctgccctagaccctgctgcagagcatctgtcaggggagtccttcctcctagatgattacagtgacttagttctcttaagaggctttacagttgaaattacattgaagctaatgttctttccagactgaggaagcacagcctagcactagcacaagtacacaggcccccgctgcttcccctactggtgtagttcctggtaccaagtatggtaagccaatctcatgggactcttgacagttggaaggtcataatttttgcctttgttgttaataaagttcctctccctttgaaacgggtgtca

SEQ ID NO: 35331 - DNA, 1200 bp, Mus musculus
gaggcacagatatggtgcatagccatacatggggcaaaatacctatgtgcataagatttttgaaattttttgaagaaaaattaacttttagtgcccagcctggtgctgtatgctagtaatataaacactgaggaggctgaggcagatagactgttgatttcaggccagtccaggatatataacaagacccttagagcccaaagactgagctctaacaccaccataaagaaagccagaaagtaacagtattagtaacctgtctttttattctgaacagttagagtttctacttgaaatctcagaaaaacatgttgaaaaggatacttcattctttggcctgcctgcctgccttccttccttccttccttccttccttccttcctttctttcttttttttaagatttatttattgggggtggggctggagagatggctcagcaggtaagaaaactgacttcaggtcctgagttcaaatcccagcatggtggctcacaaccatctgtaatgggatctgatgccctcttctgggctgtgtgaagacagctacagtgtacttacatgttataaataaataaatcttaaaaaaaaaaaaaaaaaaaaagatttatttacaggctggcgagatggctcagcgggtaagagcactgactgctcttccaaaggtcctgaactcaaatcccagcaaccatggcggctcacaaccacccgtaatgagataaaactttgggccggagcaagcaggaactgagcgagctgagttgtttatagcatgcggggttgactggagtgagccaaggtcctaacaattcccaacaaacacatgaaggctcacaaccatctgtacagctgtggtatactcacatacataaagtaaataaataaatctttaaagatttgtttacttttattttatgtgcattggtgttttacctgcaagtgtatctgagggtgccaaaagtcccccggagctggagttagagatagttgtgggctgccatgtgggtgctgagaattgaacctaggttctctggaagagcagtcagtgctcttaactgctggacctccaccctgacatttcttaatttctaatagtatttcaagtgttaacttttttctagccacatgtacttgctttttatttattgttcttgggagaattgcattcgctcccccttggagtcccttctgtgtcatgattc

SEQ ID NO: 35332 - DNA, 1129 bp, Mus musculus
attaagtatactagtggaatatgaggtggaatttatcagaatcccttatttttgtttgtttcctttgtgttcttaaagtcttcactattttggaattttctcttaatcatcttttgaaccaaaaaacactgaaggaaggtatatttgttgtaaatgttattccatgtagttttgagtatttatagaggtcaactgatagaaatgtatacttttttggtttgtttgtttgttttgttttgttgttgttgttttcgatacagggtttcgctgtgtatccctggctgtcctggaactcactctgtagaccaggctggcctcgaactcagaaatctgcctgcctctgcctccccaatggtgggactaaaagtgtgcaccaccgcgcccagctttcaaattgttaaagataggtgtgttaaagaattaaaggtagctgttaatcacctaatgtgagtactgcaaattgagtgcaatgcatagaaatgaatactattaaccagaactctctctagccctaagctgtagtattctaacttacttttcgtttttagggctggaattaaggaaggcatgtttagtgtatgtgttgcttattacatgttcaaatatttgggtttggatgcatgagttaggattcacatgtggaggttagaggttgtcttctgcgttgcccgagacagattattcactgttctgaatacgctaagcttcaggagaatctcccgtttccctttccatttcgcagtaagactgctgcatgtgcagttttccctggatcctgggatggaacttcaatccccagcaagcactttgctcattgagcatctctacagccctgctttttgtttgattgtgctttaaattttattacctcccaccatttttgcggtggggtacaagtgctgtggctgtgtggcagttgtcttctagcatgtgtgatctaggacttgaacttagttgataaggtttggttgcaagggtctttagctattgagctctcttactggcccactgttgacttgttttttaggcagtcttactatgaaaccatagccagcctagtattacctatgtaattgaggttgttttgtaaactaaatgcagtcttccttgcctaagcttactgctgctg

SEQ ID NO: 35333 - DNA, 1191 bp, Mus musculus
aaacatgtcggacacagcagcgacgcctaggagaacagagtacagtgccccagcctatctggctccttcctgtgagctggatagggagggctggtgtccccccatccccccatcgtcttcctagatgccattaccaagaaagagacctttgccatagccacctcatgcaggctcaggcagtaaatcctattcctcccagggaggcgtggcagcacctcataggctgcgttgggagcatgcttttcacagcagcagattttctgctcttagtgcagcgatatggggaggcttttcctctttgtctaccatcagaggctgaggtattgctcagccatgtgaagtagctctggctgggatgaggaagtagactacagttccccagctccctgagggatgctctcagcaggtgcccttggtcagaccctaccacagcctgaacaggcagccacgctggtccttgcccttgctcggcactccatggtggtcctgcccttctccctgcatgcctgtgggtctgctctggtatgtgaaggttggtgggctaactgtgtgcctactgaacctggcaaataaacgtcaccctgcaaagcctctggccaccctcttgcctttgcttcctctgtcctcttggggaggagcctatggaaggcagtgcgggagggacgaggctgtgggacgatcagtttttgggtagcggttgatgcttagtgtgttgcttggagtgagagtggaggtcaccttctccagtgtctacctggatgatgttgatgggactcctctggacgctaaaaatcccacgagagtggtgtgtttcagctaaaaactatcccgagctgagcgccgaagggctgacgcttttccgattcttgttgacaaagagcctttgtcttaacttggacttagaggtggaatctactcagggccaaccactataggaagtgaccttgcgcgtgggcacagtggggagagggtgggattgcacaacagttctgtgcttcttgatgcctacttcctgtgaatacctgtgctttccacttagaccaaaaagatttcattctgtcttccccggctggagcagacctactttataaagttatgtatgcttcttctgagggagtaatactgctaacgataccgtaaaaatcgctaaggagcctcgcttcaactcaagatggcctttctcagggagga

SEQ ID NO: 35334 - DNA, 1191 bp, Mus musculus
acaccctggaagaacgcaatgctaccgtggagtccctacagaacgccttaaacaaggcagagatgctgtgttccaccctgaaagtaagtcctcagagtcagtgggaggtatggccacagccacggctggtttggaacacgcagcgatctacctgcccctgcctcccaagtgtagagattaaaggcatgcactgccatgcccagcctaggctcacatttctgatcatatcttctatttctgcctcaaccaatgcctttgtttatgttatacagtagtaaataaagtgaaggcacatctctgcttcccagaccattctcctccagaccataaggaaaggggcgcaatggctgtgcttgtgggctttgtgtccagtaacaaggcctccccaacatttcacatggggcctgctcaatggagacctgagtaggctgggccatgtttccaaaagtgtctcatactccactgatgaggccagtctgaagaatcttccattaggactccagtccttggcggggctgctctctggagccagatcaaacagcatcctagggaggagcaaaggcctttgaagtccgctgtgctgagctgaccgagcagatcaaagcctgtagagcaagcaggcctagacccagatgaattttgtatcagcctgggttcgtgagcctcttgctctctgagggccacgaggcgattgatctgaactcatgattgatattctagccttgtaggcaggagcagcccttgctgggtgccatctgaaagggatgggagccatccttgtgaacagatggggccctaggattttcattttctgttcctgcttggaggccgagctgcatcacatggcctagccagtgggagggaaggggccagcaccaggttacagagcagtctctgatgcatccctggtcagacctgggaaggtctcgtgctgaggacagctcctgccttgtctctcctattctggcacttcttgtctatgtgtatagatgagatataggtttgagctcttggcttcttccatatgcgagcatgtacagtgagacccttggcagatcacagtagttctgagtcggtaagccagggaggcccatctccagggtgaggaaactgctgccctaaaagtctagcaaaaaagcatgggccaagagaaggctgcggttcaaagcctggcttggattctcaacgttt

SEQ ID NO: 35335 - DNA, 3654 bp, Mus musculus
tttgtctcctgggatttcaggtgtaccagctggacacaggtcattacctctgcaggaataagtactatggccgtggactctccatcgagggcttccgcaatgcgctctatcagtacctgcacaatggcttggaccttcgacgtgacctttttgagccaatcctgagcaaactgcggggcctcaaagccgtactggagcggcaggcctcctaccgcttctactccagctccctgcttgtcatctatgatggcaaggagtgccggtctgagctacgtctcaagcacgtggacatggggctccctgaggtgccaccaccctgtggccccagcaccagtcctagcagcaccagtcttgaggctggcccctcttctccgcccaaggtggatgttcgcatgattgactttgcacacagcacattcaagggcttccgggatgaccccactgttcacgatgggccagacagaggctatgtgtttggcttggagaatcttatcagcatcatggagcagatgcgggatgagaaccagtaggccctgtgctgggcctaggacccccctcctctccacccacaggcagggaccattgctctgaacttgctgtgaggacacacagacttgcttttaaagggttatatttctctttggtgtaaactaaaagaaatgtttttagctgtagcctggaatccatatatataaagtagaggagggcagaacatttgtcctctcagccaggctccttagctctgtggctgtgactgctgtgtccaggctgtctcaggaaggaagaggtggccccagtgggcttgacagcaaagagaatgaatgccttgaactttggtctcccttgcctaaggcgtttgggatctgtggctgtggggctctgctgatggtgaggtgaagccctcggctggcacacggtctccatgcccaatcatcccttatttcccagaactggggaaggttaagtgcccacgtcctgagggccatcttagtttcgtgccagtgctgtaacagatgcctcagggcattagagggctagctgcacagacggactcacccttgggtctgattttggcatggggctagatcggtgaaactgagctaaggccaactcagcagagggcaggccctgggctccctaggcacccactggcatgtaaccctgttcctctctccacaactcgagccagcctcttgctgggatccctgacctaaggaggcctcatagcctcctatcccactaagatgggcacagctgtttgctgaggagagccagtgtcccaggaggcctaagggcgggactttagtggctctggcccagacagtatttgcagttctgggctctgggtggcatcccttcctcacctggggcagctgtgctgcttgtgggtgggctgctgctcccagggctcaggaaccgtggtccgctcagggtcttgtcttctccaggccaagctcaaggcagcagccctgtatgtggtgctccaggctctaggcctggagggagaactttaaacttgtttgcttttagggacatagggccctgggcacaggtgcccagcgtctgctgagagctttgattaatcctggggtttgtcagtaagtccatttgtccacctgctagcccctgtctcatggtgagctttctggagtatagccttgttggttagtatatattgatttccttcatgcttcccccagcagtcttctcctttccttttctgaggtgagtctgctcctgtgcccctcctcagcaggttctgctgttacaaacctggtggccaaatgattcatagtggtgtttacctgctagcccagtggccttcttgtgggcctggggtatggccttcagcaccaacggtgggtaatgaaggctcagggttgaccctgacctattgcttttatttctgctaccagtcctttcatggtagagacctgctgctgcctgtaacatagtgtccgacaggttacactacaccaatcattgccaaggtgagcaacagtctccaagtctatcacttctaacatgtctctgttttggcatttgaaggtaatcctgccaacctttgagagaaactgttaacgaatggcataatttccaggttcttagagatgcagcctctgaaaagggttctgtgacggatccaagtcagtcttctgaccctggtgccattggtgggcaggttcccattccttagggccgggaggcacggcttggcccatctctgcttactaacacctgtcttctgtccagtagtagtgttgcttgtgccatgcaggcagcaagtgttaattagcgtggacaccttttctttggcaggatagaggtcaagagaggagtttggggccagcagagacctcctaggaatgtgctgtacttccgatttaccagattttgggaggtgctgcccccattctgctgcttctcaagtagcaagggagttggtaggcactgctcctgccactgcaagcgaggaaaggctgggatttgccgctgctcaagggcagggcctcacttttcagcacttttgatatctggaggcccagctctgttatctgataggtggtggcaagtgtgtgcgaacacttttaccactgctcttctgcctgtcccaggctagagccctgtctttttcctgacaggtcctgccttcccaatcatcaatttgggaccaaagtgcaactagggatcatgggttgggagctcacattacccctttccattgtatttcccgggccaagcccataccagcccggggagatgggtgggagtgaaatgggatgggtgctgctggaagaggaagggaccagtagagcaatgtccttgcctgggattctacccctctcagctgtgggccgtgcagtggtgtggggattcattctctcctaggggcaagggacctgggctcggacagtatccgttcagtatccgctgctcattcgctcacatctggccacgtgcacgttccctagatgcaaactgctttgaactttacagctatataagttggttgtgtgtgtgtgctcattttaaaaactacattttaacgaggaaaaaggagaacctggggaaatttcctttgcttctgtggaggaaatgtaagacttggaattctggaaattgttatctgctcctctttcctggaagctacacaccctaagacctgcgcctggatgcatacgtggctccactggcgcttaggcgcgcttgcattttccccaggtcttctgtgtggtggagaggagtgcttggcccaagccggcccttttctgtacacccagcgctatccgcccgcttgtgtctggtcgtatacgtcaaaataaagcctctagaaactgaactctgtccaagtctgtgtgaaaacttcatcgcctccggttgggccgacatggctagtctagggatcgggctgagctgggtcgggacaggtgcagcgggacagtgctgacactgggggtggggggtcgggggaggcagcacgggaggggttggatataggggtcagagcaagtgttgaggggcggggtcatcagggcgaacctggagtggcctttgggggggtaggcggcgtcggcggggcggggcggggcggggcggggcagatggcagctgccgcgtggcggactgggttccgataggaagctaagcctcctc

SEQ ID NO: 35336 - DNA, 1156 bp, Mus musculus
ttgtcttgtctatatgacatctgcccgacaggcatgtgactcagaacttgctttagatcaggcccacagctctctggcccacgggaatgatggtattggaaacacctgcagcctgtgacttgcccagcaagagggagacagactcgcccctaacctcccaggcagtagtgtgctgctcctctctgcctttgtgagctgaacgttcttaggcaggcgtcgctgcattcttaatgcagcggtgcaggaggacaggcaggagtcctgtctggagtccctggtaactctactctcctctgccccagagccctgcccttcgaccttgctacagcagcacatggcggacctgctgcgacaagggtctgatgtggcaccgagcttcctcaacagtgtccttaaccagctcaactgggccttctctgagttcatcggcatgatccaggaggtgggctgtgatgggactccgtagcttggggaaggggtgggcagagaccaaggctccccagtggcaaggcttctgactgcttcctggctacctgccggtggtttagattcaacaggctgctgaacgcctggagcggaactttgtggacagccgacagctcaaggtctgtgccacctgctttgacctgtcggtcagcttgttgcgcgtcttggaaatgaccatcacgctggtacctgaaatattccttgactggtcccgccctacctctgagatgctgcttcggcgtctggcacaggtgtgtccatcaggacaaggaggggggaccctggggatcactcaggtggtgcgcctgcccatccaccaataggcttctgccctcacagctgctgaaccaggtgctgaaccgggtgacagctgagaggaacctgtttgaccgtgtagttaccctacggctacctggtaaggatctagatgtcccgcacctcagcacacccaggccttagcttctctgccaggagctcacgctagagtccccattcaggaccagcacagccctgctgtgcacccccagcctcagcttgccttaagtaggaaaaacaggggcaaaggtcagtggtgtcagccaggcctgaagcctctgccgcagaagcaactgcgtaagtggaaccacttcatcttccttccctccccttagggctggagagtgtggaccac

SEQ ID NO: 35337 - DNA, 1231 bp, Mus musculus
tgtctccatgatgggcaccactgacatccctgattggtgagtgtgcattaaaggtccctgccttcctcccaccccgtgttcccagggagatcctgcggtctgcatctgttggtcttttataggtgtatggtggagactggcttcccttatagtaatgactacctgccagacctgaatgtgttggaagagatgctggataaatcacccatcaagtacatccctcaggtacccaggtatccttgtgccacccattcctccagagtccagagctcagctcgccacagctccttgcctcccatacacctaggtaaagacaccagtgttactgatgctgggccaggaggaccggcgtgtacccttcaagcagggtctggagtattaccatgccctcaaggcccggaatgtgcctgtccggtgagtgtcacaggatagttgggcagctggtggcaggtaaacaggacaggaccctccaatgtcatgtgttgctgctcatacaggctcctgctgtatcccaagagcacccatgcgctgtcagaggtggaggtggaatcagacagcttcatgaacactgtgctttggctacacacacacttgggcagctgaagccctgttgctctttgtgagctgggcagtccgtctcgaactttgctcttggtaagccccaggatctggcagaactgcctagaggtttcctgggctctggactccgaatgagtgggcagaggactatggactctaatcataataaaggaggacacagagcctggtctgtgctggtactttgtaccaagccatccccagccccagcctctaccttggggttcagaaaccctaggtccttggtttgatatccacagtgtattcatccctgtcatgtgacagagagaagccatgagagactcaacccctgcctgtcctagccaaacgggactggtgtagacctacatcactctttctgctctggtcccatgggctgggaacttctgcactgtccttgcattcccaggagtgcctctggaagatggtggcaccctgcccacacacagtacataccttttgaagttgttctgggatcagagcacttagcctagagtgtgctggtcttaagccacacagcctcttgcaaggagtcaacaccttccctagagacagaaactaagaagcactctatacagacagagagaaaaggccgctttatgtttgagaagtcttgacatctctaagggctcaa

SEQ ID NO: 35338 - DNA, 1192 bp, Mus musculus
aagaagccagaccaggccatcaaggtgcttgtggtgtggccgggccacacaggccctgccgggcagccctgccctacatccggtggacctgggaggccctagtgtctaggaggcaggtcagggttctgtaggcaccctgggcattgagtgtcctctgttctcagggggaccagtttgtattttatgaagactggggagaaactatggtttccaaaagcatccctgtgctctgcgtgctggatatcgagagtggtaacatctccgtgcttgagggcgtccctgaaaatgtgtcccctggtcaggtcagcagcaacatggcctttgccccttctggagtcggggtcccctgcttgagcgattacgtcttgctcatacctactttgtggttttgtttgcaggctttctgggcccctggagacacgggtgtggtgtttgtgggctggtggcacgaacccttccggctaggtatccgctactgcaccaatcgcaggtgagaaagcaggcagaccagagggcccttacggcccagctgaccatagagctgagtgtctctctgacctttccaggtcagccctgtactatgtggacctgagcggggggaagtgtggtaagtgtctggcgtccgcacgtgctttcctgactgttagtcttccctggtctatgtgatactcatatttctgtggcctagaactactctcggatgagtccctggctgtctgctctcctcggctgagcccagaccagtgtcgcgtcgtctacctgcagtacccatctctagcccctcatcaccagtgcagccagctcttcctggtgagctgaagtgggtggggtgggaggacggttagctcttgatggggaatgagggctaaagggatggtgtcatctcccccctcggggccctctcctgtcctccgtggaccagtggcctgacccttcaaggtaagtcctggaagcttgggtactctcagggctcaccacctcaaggggtcctccagccacagagatgctcgcgcgtcttagttcacgtctccaagtagccgggctctacaaggagcaggggcagagttgggggttatatagagtccatcccctgcacaaggagagctctgggtgaaaagccaagggacatgcctatctgagacaagtccaggctcccataaaagaggtaaattagcccccatctctcctaagt

SEQ ID NO: 35339 - DNA, 2412 bp, Mus musculus
gctgcaggatgtaacatggaaaacagtagctaaagattacattcaaaggactttcagaaattaaggttaagtttttacatttaatctgctgtttacctaaacttgtacgtataatttttgggtgggtatgggaaattgctttgctaaaaataagatcccagggtgtttcaaacttagagaagaccaagggacagtattttttatcaaaggaatcctattttttcacactatgtcaacttggttgctctgatatcccagagcctgactgagggcctcctggtcctggctcgggtgccagggccctggtgctgggttcgctctcccgctgttgccaggggctggaagctggaggggcctcttgggccatggacatcctgacctctaccccatgcacgctagtggcctaccaccaagggggtcttcatttctgtgggaaagggactccaaaaggcattggtggctatggcctccaacctaggtgctccaaggtgggccagctgctcgtaggggcacctgggaaggtcgaaggactccacctcatcaacctttcttttcccttctctgtggtttggtttggtttggttctgttctttcccttccctcttaaaaggaatatcacggtctttgaaacactcagtgggggacattttggtgaagatgcaatatttttatgtcatgtgatgctctttcctcacttgaccttggccactttgtcccaacagtccacagccctaccccatataccctgcccctcttctctggcgctccagtcctgggccgtgggcctgtggctggggaggagtgccagcaatagttcatagtaaaagtctgtgggctctcaaagctaattttttactaaagtttttatacagcctcaaattgttttattaaaaaaaaaaagattaaaaaatggtgatgcttagcagcagtttgtataagctcctagtgtcaactccatgggactgatggctttgctcatttggaccctcccctccttcttttcctaatgggttaaattctggattacatagaggcttcctttgccttttttagcagaacatcgtccatctgtctgcatctctgtcccatgactcaggggcacccactctgctttgattctcctcctttggaagaaaccattttgagcatgccttttcttgatgtctgagttatttcgggtaccttttagggaggaatgccttttgcaataatgtatcccttccctgatggagggtgggtgggtggacccaggctccctttgcacacggagcagtaccttctaagccatatcgactgttgagcagagggtgtgctgtctcaggaaggaaaggccagtagttcagaagggttgcttccaaatggtggttcttctgctttctccacaaggcctacccttcctgctcagcccccaggagggttctttgtagtgagcactccccatgcgggagtctgccgatgagtgcttcatggatggctggtgactgggccttgtgctcccaagctctggtccgagctggagtttccctgatgtcccagagtcaagagcagggatctgatccgatgaaattatttctggtgacctcatcaaaaataaataaataaataaacaaataaacaaatcccagtattccaggtgagggctttgggaagccctccagataactcttgttgctcttagcaaccccaccattgggcattgccatgtagagaggaggcaggcccaaagtggcctgttgtcatagcaactggaggcagtggggcagtgaacagaataacaacagcaacaatgcctttgcaggcagccccctccctgagccggcgatggccatcagactctgagacagagagccaatctcacattcaagtgttcaccaaccactgacgtgtttttatttccttctatatgattttaagatgtgttttctgcattctgtatagaaacatatcaaactaaataaaagcagtgtctttattacaatgtcattgcctctgactgtctatttacctgggatcttctggttcctgggcgtgaatggtgggagaggatcaatcatggtagagaagggcagctcagggaacctctgcagaagctgccatttctgtgccgccgggacctctgccaatacgcaagctgcttctagtgctccttctgcctttagtcaagactaactttagtcctcagtttcctcatttgccaaggtagggtataactgggagtctagtggatggggtggagcgtgatgggagatgtgcctcagaagaggcagcctctctgaaggctggggtggagctatgctgatggaaactctactgtggcttttatcgtcttttgtccaaaaatacctatgggcttgggattggctggtaaccttagcgagcggtttctaaccagggtgctttgtgcttgagctt

SEQ ID NO: 35340 - DNA, 1170 bp, Mus musculus
ccagactggccttcaactcatctctccttagatctgcctcttgagttctgggattacccgtgagcatgatgcccagtcaaagtccgtatgtccttaaggaccgtgacatcctagtgtgtgttagtgtgtcccagtgctgtgtggcatgtgacaggatgtcatgtgatagggcactactgctttccttaggaggtgatgagttggatttcccagcaggaattgtaaatcattcctctagcttatcacacacctcaggttagagcttggtttattatggtgatcattttaggccaggccatgatggtaacatttataactcacacttttgtctcttctaggtgtctgcagcagggaaggaggccttaccgtcttggctacactgggacccacacagtcatattttggaaggccttcctcttgacactgataaaggtgtgcattacatctcagtgagtgctgcacgcctgggagccaatggaagccacgtcccccagacttccagtgtgttctctatcgaggtctaccctgaagaccacaatgagccacagtctgtacgggcagcctcatcagaccctggtgaggtagtgccatctgcctgtgctgctgatgagccagtgactgtccttacagtgattctggatgctgacctcaccaagatgaccccaaagcaaaggatcgatctgttgaacagaatgcagagcttctcagaagtagaacttcacaacatgaagttggtgcctgtagtgaataatagactatttgacatgtcggccttcatggctggcccaggaaatgcaaagaaagtggtagagaatggggctctcctgtcctggaaactaggctgctccttgaaccagaatagcgtccctgacatccgtggtgtagaaacccctgctagggagggtgctatgtctgcccaacttggttatcctgtggtgggttggcacattgccaataagaagcccactctccccaaacgactccggaggcagatccacgccacacctacacctgttactgccattggacccccaaccacggccattcaggagccaccatcgcggatagtgcctacgcctacatctccagccattgcacctccaacagagaccatggctcctcctgtcagggatcctgttccagggaagcccacggtcaccattcggacgc

SEQ ID NO: 35341 - DNA, 1221 bp, Mus musculus
ggtccttttctttgctcccaggtgccagagctcttagattctgcctcattgaggtcattatgcctttgctttgcagagcccctccttggcgttccccaagtggctttcccacccagtgtccaatgagcagcctgctccccgccttgaggtaagctctctaacactgggtattaaccacatatacatggttctaatgtctagagcacaaaaaaagtgggcctctggctatcctggggctacctggaaatgtagctcagtggtagaatacttactacccaacaccacagacatttgggtctggacctagggcctatggttcaatgtcttcttgggagctctgtgggctttgagtcatccctggtttaagcatgggtcttgcttaatgaccatcaggctataactgttcttcaagttatctgggaatgttactggtttcatctgcagtgctccatagcttatatatatctaagggcatttctggggaaagattcatgaccatgttccttccttctggagcagggtctcccagatcccagcagagtgtcctctgaggtgcagcagatgtgggcactgacagagatgattcgggctagtcacacttccacgaggatcggccgcttcgacgtgagtaacagtgtccctcccccttgcttccatcactttgagcggctcaacactgatcgtttcttgtgttgcaggtggatggctgttatgatctgaatttactctcctacacatgaacagcagcttctacgtgagatgttggctttctgtgcccatctagatggggtttggccaccagaggccgttccctgtgcatccaagttctatctgggcaaaaatctgcagattgggaattcttgatacccatccagttgttttagcatgaattcctagtgggggcacttctgtctctgactgtctgacatgtaaattcagtctcttcctctcagaattcaccggttctaattagaatccttgagctcctcttgcttgtcctgccaacacgaacaccccagtctgctaccatttccccccattgctgagataaacctgtcacttgtagcaaggaagccactgttgttttgacactcatgacctgggaagcttgaggaagacataccctctattcattcctctgcttctgctagtagcccttgtccttttgtattgtatccatgaaaagaaaatgtcctagagccaggcatggcacacaccttt

SEQ ID NO: 35342 - DNA, 1129 bp, Mus musculus
cgtttgcagggtggagtctgcctgtacaataccgtgacagtcatgttgattcacacctgcacacacgccggcattgctctctctttgatgtgtcccacatgctacaggtgagtcagggaggatcgggccttcttccacgtctacagaactgagctctgcagctttgaggctatcttagaagactaaagtgttagggactctagagggctaactcaggagatctgatgatgatgtatctttgatctctcctgcctgctcctgtggtgtgttttaatgccccggggcttgctagatagaaattggtttggtatctcagtaaggtgttagatcgccttgaatttttagatgttgcttggttgcacggaggctgggagggatcctggaattgagaaggtaggacctctgccctctccagaaccaaaagaccagtagtcacttctgggctggactggaggatgcttgccttgcagccttttagattacagatattgcagtggcctggggctttccctattttccctagaccaagatatttggctgtgaccgagtgaagctgctggagagtgtagtggttggagacattgcggaactaaggcctaaccaggtgagcctactttacttcttctcaaagtgtgttttcagtcacgagccagtaaacagcttacacccttgcctcaagtgtaatcagcagccaacggcgcacgcctttaatcccagcacttgggaggcagaggcaggcggatttctgagtttgaggccagcctggtctacagagtgagccagggctacacaaagaaaccctgtcttgaaaaacaaaaacaaaaacaaacaaacagtgtaagaagcacaaagacaggtcagatacagcttttcagggcttgctatcttgatggagtcttttgagtcatttccagatattcagctttggagcaatatcccagccttactccattgggttgggaggccagagaccaccatttatataccctgacctctcatgcttcccatatctttgctaattaaagtgtggtccttaaaccaggagcctctccatcttctaggaatatgctaaggcactgctctggacctgctaagccataaccttggttttactaagatccctaagtgt

SEQ ID NO: 35343 - DNA, 1113 bp, Mus musculus
ggtgaatttctgagttcgaggccagcctggtctacaaagtgagctccaggacagccagggctatacagagaaaccctgtcttgaaaaaccaaacccacccccccccccaaaaaaaaaaaacctgtctcaaaaaaacaaaaaataaaataaaataaataaaaaataaatcctaagacaaaaaagatctacttgtaaagcttagatcggatagcgcatgcctataatcccaaaacctgggaaatagaaacagtccaatcataaattacagaccaaccttggctaactgtctcagacagaggaataggattgggaaaagtgggcaatacactgtagtggtagagagttttactcctgcatgaccaaaagtagtaaaagtagctacagcattcaagacactgcctatctgctctctgttcctttgtgcagatatcagtcccagcaacaggggcagtccacttggcaactactctgttgaaaaatccagaggtaaagctggcaggactagcagcccgagatagcctgcgcctggaggcaggcctctgtctgtatgggaatgacatcgatgaacatactacacctgtggagggcagcctcagctggacactgggtgagccgggctagcagtcaagggggtcctgagagctagaatactctttaatgaagccagctagcccaggactactcctaaggttgtgtagtctggaacaagtgactcagccttgctgtgccttcattccctgaaggtgctactgtggctttgtctattataaactgagggtcctacatatggcttccagagggtaggtgatggttggttgactgactgtaattcaggggaagaatagtagagctcaagaggccaagtgatgtttaattggttgtcacttggagtcttagtagtaaagacttcctgtgcttagggcttttgtgaactatggcttacagtctggtgtgttatgttccagggaagcgccgccgcattgctatggacttcccaggagccaaaatcattgttccccaactgaagggtgaggtacagcggagacgtgtggggctgatatgtgaaggggctccagtgagagcacacagtcctattttgaacacagaaggcac

SEQ ID NO: 35344 - DNA, 1381 bp, Mus musculus
gggtggtgctaacttatggcctatgcctggacaggtactgtgaccagtggctgcccttcacccagcctgaagaaaaatgtggcgatgggttatgtgccatttaagtacagtcgaccagggacacagctgctggtggaagtccggcggaagcagcaaatgacagtggttagcaaaatgccctttgtgcccaccaactattatactctcaagtgaagatggcccatggggaagcccttccctccaggagtgtttctctagagggcatggcatagtgcttagtcagaacagtggagtacaactcccacgggtggaagctgaatgaggtttgctgggtctgcttagggttggggagagaatcctatctagaatctttcccttacaagccattccaattttagggcccaattttttttttttttttttttttttttttttggtttttcgagacagggtttctctgtatatccctggctgtcctgaaactcactttgtagaccaggctggcctccaactcagaaatctgcctgcctctgcctctgagtgctgggattaaaggcgtagggcccaatttttaaatgacaaatcaccttacttaatgtcctgttttagcccacagtcccactaaccttaatctgcctggtgctgactttggaacaaaggtcatcctgcctttgtgtggagggtaacacctccgcccacctcactatggcttctctaatttcaaagaactattactgtgggcagtatggacttaggtaccttctccactttgcatactgctgcctttccttagatagaaatgactcctgacgtggtgttggctgagttgttcctgtgtgcaaacatagagatggctaagcaaacatgggactcacccttccacattctctagtcaacccagcctgctgtgcagcaagacatggctggtttaatacttgggctgacctcggtcagttgttgtgaataattatactttactaactcttgaaaaataaaattaatttctttcttacttgctatggtctctagcttccttgttctttcgtcactggatttctggggtgtcttttttttttttaaagatttatttattttatgtctatgagtacaccattgctctcttatgacacaccagaagaggccatcagacccctttacagatggttgtgagccaccatgtggttgctgggtattgaactcaagtcctctggaagagcagtcagtgctcttaactgctgagccatctctccagcccctctggggtgtcttcttagcctctaagacaggctctaagtaggatttccttggaaagggccagctatatgagaactaaggaatatagaagtggtgtgctggtctatccctgtaatcctagtacttc

SEQ ID NO: 35345 - DNA, 1186 bp, Mus musculus
ctccgccatgactggccagcgccccaccgggagtactgtcaccgtagttcttactgcgcaagcgtatggtcttccggggttaggcctgtcagtgcgcacgcgtaatacaaggcaaggaagatctacttcgcttgcgcgaagtgttggcagtttggggaggggtttttaaaaccgcgcaggcgcacccagccccaccctgcttgcttaaaggatgagtgattcggtgaggataaaatagcaactcgctcttttatagccccggtgttcccgtcatgctccacgcgtctgccatgattggttaagcgtctagctctcagggcgtggatgcgttcttgagcaatcgtggctgaactgagagtgtgcgcgcgtgcgcggggccgcgactggcgccagctcgagcccgcagggcgctcggggccgcgcacgtcgctccccgccctcccgccaccgcccgccctcgttcgctcgcgctccccgcccgccgcccgcggtcctccgtcggttctctccatagcccgccgtctcccacggagctgcccgtccttggctcggagctcgcggactcgcggacaagcgtcctcagcgcgaagaggccggactcggagtcctcgccttgaggtgagcaggagcatttccctccagccgcctcggctccgggcccggctggtcggctgatcggcaagcacttttccggcctccggcccgtcgcctgcccgcggtcgcgccccacctgctgctctcggcccgcagcccctcgccccggcccctgacctggggccccgcgcccgaggcggcggccccgcccgcgcagtccccggaagcgcgccccgccgcctccagtcccccttcccccgcccggccgggcctggtggagccctagccgcccgccctcctcgtcgcttcctctcagggttgcgccgggctgggcgggggctcccggccggtccgcgaccgcgctggggtagcctgccactgcgaagcgcgtgtggctgtcgggagttggactaggcaagaaactcttttacaactccattttgccttttgcattgaacgtggattattaatcccgttctataccgggtgaagacagtgagggtttgggtggattttctgttttgagtgccgtattattggagattgtgtaagtaaaagattgttttgaaatcttagcggttatgactctatg

SEQ ID NO: 35346 - DNA, 2084 bp, Mus musculus
aacaaaacagggctggagaaatggctcagtggttaagagcacggtctgctcttccagaggtcctgagttcaaatccgggcaatcacatggtggcttagagcattggtaatgggatctgatgccttcttatgatttgtctgaagatggctacagtgtatatgtataaataaaataaatcttttttaaaaaagaaagaaaaagaaaacagaaaaggacaagaattagctgaaaacacttttttctcttttcttgttttcttttctcttctttttttttttttcttttcttttcaactaggagccggtaaaacctgaagaaggcagagatatggcaaacaggattggcgcttttgggtacatggagtgttcagcaaagaccaaagatggagtgagagaggtttttgagatggccacgagagctgctctgcaagctagacgtgggaagaaaaagtctgggtgcctcatcttgtgaagccttgtgaacgcagcctcatgcggttaatttgaagtgctgtttattaatcttagtgtatgattactggccttttcatttatctataatttacctaagattacaaatcagaagtcatcttgctaccagtatttagaagccaaccacgattattaataatgtccaacctgtctgaccagccagggtccttctgacactgctctaacagccctctctgcactccacctgacaccaggcgctaattcaaagaatttcttaacttcttgcttctttctagaaagagaaacagttggtaacttttgtgaattaggctgtaactactttataactaacatgtcctgcctactttctgtcaactgcaagaactctggtgagtcactacttcagagctttccttgttaacagactccattgccagagctctggggtgggtattcagttttttgaaatcttgctcagccagaaaggcccaagtccacgcagctgttgcagagttacagttctgtggtctcatgttagttaccttatagttactgtgtaattagtgccacttaatgtatgttaccaaaaaataaatatatctaccccagactagatgtagtattttttgtataattggatttcctaatactgatatttgtcattcccacagaaagtgtattgcttcttttctttttctttctttctttctttttttcttttttttttttttttttaagaaagtgtatttggaaataaagtcagatggaagaattcatttttaaaattcccattttgtcactttctctgataaaatatggccatatcccttattcagccctatatatcattctagtacccctttccagactggactaagtaggaatttggtttcccgcctgaggcagttatactttggaggtggcatagcctttctcacctggactgcagggtctggctctaagtcacagtgctcctttctccacactgtatccaagttgcctcccagaggagccaccagttcttatgggtggcagtgggtgggggtgggggggtctcttctctccagctgactaaacatttttctgtaccagttaatttttccaactaatagaataaaggcagttttctaaatttcctgtattctcttgtgtgttgctttcgccggaaagactcccctggagaggcttcttgaatggcaccagctcctcctactccctccctcttctagactaaccttttgtctcctcccaagaacatggaagtggtttccctgtgacacgttcaaatctaaaaagtggagtggaagccgggtgtggtggcgcaggcctttcatcccagcactcgggaggcagaggcaggtggatttctgagttcgaggccagcctggtctacaatgtgagttccaggacagccagggatatacagagaaaccctgtctaaaaaagacaaaaaaaaaaaaaaaaaaaaaaagtggagtggaatgtcatagaggggacatgaggggctgggttttctggactaagaccaaactgcactgggggcaggaatctaggaccactagaagcacgtgttctgagaggagctaggttagagtctggagcagggagtcctgcactgctgtccacccttac

SEQ ID NO: 35347 - DNA, 1752 bp, Mus musculus
ccatcttcctaggcgggactctagactaattaagaaacggttgagtaagacagagctggaagatccccgcctaagcaagcagcttccttccagactagtgctacaggagctagaccagacccgccctaggcacctccaggcgctttagcccggccgcaccctcttccctgttcctcgatggggggagggtagaggccggataaggcgggaccctgagacttagagctggctgccagccggaaagaaagcgatgccacgtgatctcagcaccatccagttaaaaggaggtgcagggccctgtgagcgctagtacggattccacgtttgagtcccaacatctccagtatgtgtgctgctcggctctccgcggcggcacagtccaccgtgtatgccttctccgcgcgcccgctgacgggcggggagcctgtgagcctgggctccctgcggggcaaggtgctgctcattgagaatgtcgcgtctctctgaggcaccacgatccgggactacaccgagatgaacgatctgcagaagcgtctgggacctcgtggactggtggtgctcggtttcccgtgcaatcagttcggacaccaggtatatggggcgagatgggtggccttgggctctaggctcccacgggcgggacaccgcttactttctcctctggtactacagctggaatgcaggcctatcctcggttatacaaggagggcaacttcctggtgactcatcgggaaacctctgttttgcagttaaaaagcacattctttccgaaatcctagcacataaataaatgcctttgtcttccctaggagaatggcaagaatgaagagattctgaattccctcaagtacgtccgacctggtggcgggttcgagcccaattttacattgtttgagaagtgcgaagtgaatggtgagaaggctcacccgctctttaccttcctgcggaatgccttgccaacacccagtgacgaccccactgcgctcatgaccgaccccaagtacatcatttggtctccggtgtgccgcaacgacattgcctggaactttgagaagttcctggtgggccccgacggtgttcccgtgcgcaggtacagccgccgctttcgtaccatcgacatcgaacctgacatagaaaccctgctgtcccagcagtctggcaactcctaaggcggccctggcattggcttggtgattactggctgcactctggggggcggttcttccatgatggtgtttcctctaaatttgcacggagaaacacctgatttccaggaaaatcccctcagatgggcgctggtcccatccattcccgatgcctttccacctaatgaaaggtggtttcactactaagaataaagtgctgaatatcagaattgtttgtgtgtcctgtgtcattgtcaccttttggatagcctcatagtcagggataaggaactcaatcccagagcctaaacgtccctttccccgccccttatgcttttctttctccctgtcccaggacatggttaaggtcagtcttgagtcgccgttacagcagaggccatactccagaaggaggaagccagtagacaagggcagactgcctaacggttaaggccaccctaaccccaaacgtgaacttctcctttctgagtttttggtggatgaggaagtgactgtgtgcccctgttcacacaagactctagaaatctagatctttgcccacagaagtctgttttgcacagctgcaacagccttgcacagtgttacc

SEQ ID NO: 35348 - DNA, 1204 bp, Mus musculus
ggaatattgtgcttgttcctgttgaatcttttcttatgaaaaatacataagaatcttgtttcaaaaaacaagcaaccaaacaaaaagaaacttctggggaaaagaaaaatgagatctgccctgatttcctttttcagatcctgagagtcagaccttgaaggagcacttaatcgatgagctggactatgtgctggtcccagccgaagcctggaataaattgctgaattggtatggctgtgtggagggccagcagcctattgtcagaaaagtgagttgacaagttgttagacctgctaggtgtgtatgtgagttctccttgggtacactgacttctctttatttcccgggaggatgaaaacggttacatggttgaaaatgaagcaggtgagactttgtaatgtttttggattttggtttgtttttgtttttgaaacagggtttttctgagtatcccttactagtaagtagttctggaactttctatgtagcccaaaccagcctcaaactcagagatccctaagtactgagattaaagatgtaccaggctttagaccttgtttatgtttcctgagacaggatctctgtgtatcccgggctggtcttgttctggtcatctcctgcctcttgtatgctggaattttggcctgaatgactattctacttctctctgggatatgaagtatttgtgagtaactcaggatgttcctaagtggcctccaaatacaagagctgcctgctggtttggaatgcccatagtacttggaacccagctcttcagttgggctgtgtggacataatcgaatgcattgcaccttgcaccgcttccttttccccaggactgggagtgaacctagggccgaatagaatacatgactcactgagtgtcctagcactgagctatatccagccctcttttttttttctttgagatggtgttgtactgagttaaccaggccaaatttgaactcacttatagctcaagtaggcctagaactttgaccattttgagccttttcattgaggctcctggatgttgagataactagtgtgagccaccatgcttacctaacaacttctctttttctttttctttttcttttcttttcttttcttttcttttcttttcttttcttttcttttcttttctttctttctttctttctttctttctttctttctttctttctttttagatttatttatt

SEQ ID NO: 35349 - DNA, 1467 bp, Mus musculus
attgaggcagaaggataaagagttcaaggtcggcctgaactatacagtaactttaaagccatcctagactacatgaaacagtttttttaaaagggagcaggtgggttggtagtcatggtggttctgatttgaaataatgactccttaagaacacagctcttgtttcttcttcttcgggaaaacaccaaatggtggatgacgccggtgcagcgagagggcccggaggacccggggcccaggattaggaggccgcggtggcttccgcggaggattcggcagcggtcttaggggccgtggtcatggccgaggccgtggtcaaggccccggggctcgtggaggtaaagctgaagacaaggagtggatccccgtcaccaagctgggccgcctggttaaggacatgaagatcaagtccttggaggagatctacctgttcttcctgcctattaaggagtctgagatcattgacttcttcctgggtgcgtccctaaaggatgaggttctgaaaatcatgccagtgcagaagcagactcaggctggccagcggaccaggttcaaggctttcgtcactattggggacacaacggtcacgttggtcttggtgttaagtgctccaaggaggttgccactgccatccgaggggccatcatcttggccaagctttccattgtccctatgaggagaggctactgggggaacaagattggcaagccccacactgttccatgcaatgtgacaggctgctgtggctctgtgctggtgcatctcatccctgcccccacaggcactggcattgtctctgctcctgtgcccaagaagctcctgatgatggccggtatagatgactgctacacttcagccagaggctgcgctgccaccctgggcaactttgctaaggccacctttgatgccatctccaagacttacagctacctgacccccgacctctggaaagagactgtcttcaccaagtctccttatcaggaattcactgatcatcttgtgaaaacccacaccagagtctctgttcagaggacccaggctccagctgtggctaccacataagggtttttatacaagaaaaataaaagaattaagtctgcttaaaaaaaaaaaaaatgcagctcttaccagacagtggtgccccacaactttaatcccagtcctcaggaggcagaggcaggtggatcctgaatttgaggttagcctggtttatacactgaatttcaggacagccaggattatacagagaaactctgtcttgaaaaataagcaaagcagagagagagagagagagagagacagacagacagacagacagacagacaaggatgaagctctgtcatactgaggagagcataccccccaagcaacatggaaatgtatgtattgtctatgtatcagcagtcctgaatgggcttttatgattcctttctagtaagaaaagctagtagctgagagacaaggcag

SEQ ID NO: 35350 - DNA, 1105 bp, Mus musculus
gatgcagtagagtttccttaagtttgtcttccagacaggtgggagaacaagtcaggtatggtcagtgggtcttcatatgcaattctgctggtagcagagggcaaggtgatacctgctgggtgtggctgtgcccactttttctcctggtcctcaagggaagcaaaggcaggtagaacagatctgaagttgaagccagcttggtctttgtaatgaggttcgggccatccagagctacacagtgaagctgtctcaaggggaaaaaaggaaagaggggtgatacatagtattaaatggcaatttatatgcttttaacatttctctagaggaagtgctgacccaatccagaaggtaaaggatacagcaatatttgggagggaaggaggtggctgcctgagtgttgcagctgtgctgacagcagagccttggctctgtcagctggccatatctgggccatgcactgcctctggaggaatcctacgtctccaggatgtgtcttcctctagggtcatttcttgtctcctgtcaccttgactgtttctcctttgcagtaccgtgtgactgtgccattgatgggggccatttctgacctgtgtgaagcactctccaagctgtctggcattgctgcagaaaatgtaagaaggagtcattagtggtccctcccaccatcaaatcactttatggtcctttgggtttactctgaaagttttgggagatttttgttattggacagtgcaaatgtcttggatacctcatagctcctggtcttactcacggtcctttccagtgcagggaaacagtctttctctcactgtggtggtgccgcccattgtcagagggacaagagtagggcttgctttcatcatggtgcaggtatagagactggctctggaaagccactgggatttctaggccatgaccagtgtctgctcagcactcccttctcatcgttcctcccatttgaaggcaatgtcatcaaacagccgtgctggcaatagcctgctgctccctttccgtcttggccatacgtcgccttgggaccactcgaatggtggttcttggtaggcaacacttgagcaaggagtttctgccgctgtttctcagtttt

SEQ ID NO: 35351 - DNA, 1158 bp, Mus musculus
ctaagtgatgcaaagctagctatgcaagcccaccatcactgtccgttgagtccgatttatactccctccaaacatcacgtgtcctcccacaggtcttgcctcagcaaaacactatgtgagtccatcttagctaaactccatgtgagtctgtatccgctgacatatccagaaacttccacttcactctgccagagtctaaaagaggcaagaaggcaccaaaacaccaccagaagttttttggtgcatttctttctatgaagtcacgaccagtaaggaatggcaagatataccaataccatccagcttcatccaccttctgttgggtcctacttatattccttcttaacatcatgcatccagctgggcagtggtaaggaatgcctttaatcccagcacttgggaggcagaagcaggcagatttctgagtttgaggccagcctggtctacacagtgagttccaggacagccgggctacacagagaaaccctgtctcgaaaaaccaaacaaacagaaaaaccaaccaaacatcttttcacgtttttgctgtagaaacatccatctatttatacgtaagtacactgtagctgtcttcagacactccagaagacgaagtcagatctcattacggatggttgtgagccaccatgtagttgctgggatttgaactccggacctttggaagagcagtcgggtgctcttacccactgagccatctcaccagccccgaaaacatccttaattctgtgtcttcttcagtgaaacattccttcatgtctgctttagcaaaacatcctttcacctgtatgccccagcaaaacatcatttggcataactgactttccacagaagccagaagttcctacttcagaccagtggatctctgagcttgagaccagcctggtctacagagtgagttccaggataatgagggcaatgcagagaaactctgtctgaaaaaactaaaccaaccaacaaaacaaacaaaaagagaatgtctcttaatctcaaaaaagttttataaatttaggtctaaaaatggtgtttgctgaggcctgctccttttaacataactgtagccatcttgtatttcatagtccattttgctcataaggtgaaattaaattcaggttctcagagtctttttcccagaagtaatta

SEQ ID NO: 35352 - DNA, 1102 bp, Mus musculus
ctgacttggatcccacactctcagattggggtcccttgcccctttctcccactccccaaccttcccagcctgactgcctcctgtcaactcaatctctaccttgtccctagcctgccagtgtagtcctgatggagcactcagtgccctctgtgaagggactagtggacagtgcccctgccgacctggtgcctttggtcttcgctgtgaccactgtcaacgtggccagtggggattccctaattgccggccgtgtgtctgcaatgggcgtgcggatgagtgtgatacccacacaggcgcttgcctgggctgccgtgattacacggggggcgagcactgtgaaaggtgagcctagagcagctacggtggttggtggttgggctggctgcttgcagataacactcattcatttccctacaggtgcattgctggttttcatggggacccacggctgccatatgggggccagtgccggccttgtccctgccctgaaggccctgggagccagcgacactttgctacttcttgccaccgggatggatattcccagcaaattgtgtgccagtgtcgagaaggctacacaggtgagtgggcaggactgggtatgagatcagggtcaggtagctaagctaagtaatcatggtttcctcttgactggacagggcttcggtgtgaagcttgtgcccccgggcactttggggacccatcaaagccaggtggcaggtgccaactgtgtgagtgcagtggaaacattgatcccatggaccctgatgcctgtgatccccacacggggcaatgcttgcgttgtttacacaacacagaggggccccactgtggctattgcaagcctggcttccatgggcaagctgcccgacagagctgtcaccgtgagtaggactgtgggaagagatggttgggtggcttctgctgaagatagagccccttgattgttgtgtctgtcttggcttgcccaggctgtacctgcaaccttctgggcacagatcccaggcggtgcccatctaccgacctgtgccattgtgacccaagcactgggcagtgcccatgccttccccatgtccaaggcctcaactgtgaccattgtgcc

SEQ ID NO: 35353 - DNA, 1216 bp, Mus musculus
taggttgtcttagtcatgcatatgacagatagttccacattgtcaggccttctttgttaaaaatagctcattaaaatataacttatgggctggagagatggctcagcggttaagagcactgactgctcttctagaggtcctgagttcaaatcccagcaaccacatggtggctcacaaccatccataatgagatctgctgacctcttctggtgtgtcttaagtcagctacagtgtacttacatacaatagacaaataaatctttttttttaaaaagacaggaaaaaaaaaagaaaaatcaaaaagaaaaacaacaaagatgaggcaaggttcttgatttcttctgcaggtgaagtggctggccagaccctgtctctgatggagcagctccggggggaggcacttaagtttcataagccaggtgagggggtaactcgaaattctggggtgtgctggtggttagcattacagtcacacctgtaagtcaggatccttgcctgacagctgctcctggtcatcagctctattctgatcctggcaggtgagaactacaagacgccaggctatgtgatcactccatataccatggatctgctgaagcagcacctggagatcactgggggacaggtgtgtgggggtgtggccaggcagacacttgactgcctaggctgcctcatctcatctatttcagtaggtgatctgagctttggtcccattccctttatcccattcctttacttaggtacgtacgcggttccctccagagcccaatggaatcctgcatattggacacgccaaagccatcaatttcaactttggttatgccaaggtaagcatttgtctaggtcctggcaagtaatatgatcactgtctactcccatgactgcattccagaaaggtatatttctgtcttgccttttgtagctgatgacagaggccctagagaaaaactccatgtaacagctattgtcaggaaatactgggttaatggggaaaattaaaatggttctttagatagggtttcactgtagagtcctgatggccttgaattgtggcgatcacatgcctctgcttcccaggtactgggattaaaggggtgcaccgctatgccccatggaagatgcatttcttcaattccttatattaacttttcaatttattttttggcagtcatcaatagaagacattaattaaaaaaatattcctaggtggctgaaa

SEQ ID NO: 35354 - DNA, 3198 bp, Mus musculus
ccatcgcacaggggacaaatggtacacattggcatgatgaagggtgaagtagcagggctgtggattgggcagagagactggttggctagtctaatgcttctgttccacaggtgcatctaccccacctatgactacacacattgtctgtgtgactccattgagcacattacccactcgttgtgtaccaaggagttccaggctcggtgaggaggctgaagtcatgtagtgggtatagctagggggattccttatgtgtttagggtgtatatacatatgagtggggctgtgggtgccacagtatgtgttgagatcagagtacaacttgtggaagtcagctttcttcttccaccatataggttccagggatccaacttgattttccagagttggcattaagtttctttacccactggaccctctcgttggcctctagtgctttttctgtggtctttttatgaccccacagatggctaacccttttcttccatcctagacggtcttcctacttttggttatgtaacgctctgaaagtctattgtcctgttcagtgggaatatggtcgcctcaatttgcactatgctgttgtctcaaagcgcaagattctccagcttgtagcagctggtgctgttcggtaggtgtggtcatggggtctgccagaggttgtagctcttgtggcatgtgctgtttaagatcttctgaccaccctcttatccaaagggactgggacgatccacggctcttcacactcactgccctacgacgacggggttttccaccagaggctatcaacaacttctgtgctcgggtataattcagtaggcttagtgggtgaaagcaggctgggtgtggcccttttacttgtggtatgactgatgagttttcctaccaggttggggtcacagtggcacagaccacaatggaacctcatcttctggaagcctgtgtgcgtgatgtgctgaatgatgcagccccacgtgccatggctgttctagagccactacaagttgtcatcaccaactttcctgctcccaaggtgggcctacctctgtgtgtgtgtgtgagcatgtgtgaatgccgagtatctgagataacagctatctgtctcctgctacagcccttggacatccgagtgccaaatttcccagctgatgagaccaagggtttccaccaggttccttttgcttccactgtcttcattgagagaagcgactttaaggaggtaagtggggtttactgctaggtctatttttaatagcctctccttcctgctttacatgagccaatccctaacaaacatgaggttgggagaagccttgttcttggatgatgtttgcagcttctgtatcttccatgcttcttttctttaggagtcagaaccaggctataagcgcctagcttcgggccagcctgtgggcctgagacacactggttatgtcattgaactgcagaatattgtcagggtaagagacagctgcagtctttctgtacagtgcctgctagggccaagattgtgtgttgctaacagtcttcatgttggtccctggtctgattccatcttcctcacttctagggctccagtggctgtgtggaacgcttggaggtgacctgtagacgagctgatgctggagagaagcccaaggcctttattcactgggtatcacagcctttggtgtgtgagattcgcctctatgagtgcctgtgagtgaacatagctggaattgagactgtcacaggatgggaattgcatgctgtggctctccagcaagggcctgactttcactctggctacagattccagcacaagaaccccgaagaccctgttgaagtgcctggtggattcctaagtgacctgaacccggtaggctcatagaatgtgaggtgagggtggtgggcttctgagctggacagccacttggattctctgtctgcaggcgtcactacaagtggtagaaggagcattagtggactgctctgtggctttggcaaagccctttgacaagttccagtttgagcgccttgggtacttctctgtggatccagacagccatcaaggacaggtgcttaatttgacccacctatacccttctgtgtactgatggtggaagctgttcactgtgataaacactctccctacatccccttagcattctccaaataagttgggagggacattcattactttccagttaagtccaagcacaaaattttatagggctctaactttttttaagatttattttattttatgttagtatgctgctgctgtcttcagacacaccagaagagggcatcagatcccattacagatggttgtgagccatcatgttgtgaattgaactcagaacctctggaagagcagtcggtgctctcaactgctgagccacctctccagccccggccctaacttttttactcttcaaagtagcaggcaagcttagagtttgtcataatcctcatgaaactaaggcacagcacaggcatctagtcctttatctgaaattacagagttattgacaaccttggtacctcacctccatgatacctcacctcctaggtgatgaaggggaagtaagaagcccggttcggggttgttggtcatttttcttctactgcctttcagattgtcttcaaccgaactgtcacactaaaagaagacccaggcaaaatatgaactgaatacatgtggccctacctcatcctggaggctgggggtgcccttcagcactccacactccgtttcaataaagaataactaaatccctctggcgtctctctgttgtctgcctttctaatatctgaggaccctggagaaatagtttgttagctggcagtggtgggtctcatatgtcttctggaagaatgcacttccccagaaaagagccagccacaaagtcactactgcacttggttctcaaaggcaggtgcatggctggaattagctcagcacttactatgataaacctgagaaccccagagatgctgttgcacagtcaccagtcctatggagggatctaggtttgtgtctttgtggctagagatcaagagacacatgaccccccgtgtgatcatttagaaaaaagccctgtcaactatttaagcatagtgagataaatcatgaatgctgttgtggcctttccagtttggggaccccagcaaactccctggatgtctatacggtgctgagatgagattcctggc

SEQ ID NO: 35355 - DNA, 1099 bp, Mus musculus
ttttccacctccgcgtgggtgggaggggcttgcctttctgttcttgataagggctgtttcttaaccttgattaacttgatcaatgctttgccggtttttttctttgtaatttctaaaatgtccagcaaaaatttctaaaatctgcctgtcactataaaaactatgtaactgaagttcttctcagcttttttttttctttccacattttgtttcagtgctgtgatcttctatctaggaaattctaggtttgtgatggagaaatacacagctctttttttctaagacaaaacatctgctagtttatttttacaattttgttacattaagcctgaggaaaagcaagctaaaaggatttttattccttttagtagcaaccaaactttgatagtaatgacttttttttaatatactgtatttttttaagaacaaagttaaaacttaaaaagaggctgaggatggaaggaacttctttgttctatcttcttcagaatgttagaagtcttaagaactcaggacaagcagcagacatacatgcaacatggtgactggtgagttaaaaatcattcatacgctggaagtatgtgtgcagtccgttaccccccaaccccttggtaatactgaaactttacaaatcttgtcattctttcttggtgttgtctgctagaagctgctacctactaggaaactgctgatgagggaaacggtattagtttgttcattggacaacagtccctaaaatcgaagtcagtggaatattcatgattaacattgcaaagcatcagctaagaacctaaatggttttccaaaacaaacagaatacaacaacaacaacaacaaaaaaaaactgtcctctttgttgaggatgtgtctgtgaactttttgtaccatttaagcttgcttattctagtttactttttttttcttttcttttttttaaaccaatgtttccatcaactagtatttacctgttaggtaacttctagttttctgggataaggtgttatacttctccaagatcttacacagttcacatcattttacaaaagcttatattgatgtctcaaagaaagacttaaggaatggttgaattttgttgtga

SEQ ID NO: 35356 - DNA, 1092 bp, Mus musculus
acaatttattttggggagaaagggaaggtttaatataaaacttaagtattttgtgtgtgtgtgtgtgtgtgtgtgtgtatgtatacacacacacacatatgtatatatgatgttatatataatacacagactatttcattctcattgccagttattgtgtctgtgtatttcgtgatttcaagatatacaaacagtaggattggtaaggtggctcagtaggtaaagccacctattgccaagcttgatgacttgattttgatccctgagaactacatggtggaaagagaaaaccaacttaagtgggttgtcctctgacttctacacgcatgtcttggcatgtgcatgcctataccccaataattaatgtaaaaaatataaaaccaatatgctaacagcagagtgttgactatccgttttaattttaggaaccctaaggactctgcaatatgaataattctctagagaacaccatctcatttgaagagtacatccgagtaaaggcgaggtctgtcccgcaacacaggatgaaggaatttctggactcactggcttctaagggaccagaagctcttcaggagttccagcagactgccaccaccaccatggtgtaccagcagggtgggaactgcatttatacagacagcactgaagtggctgggtctttgcttgaacttgcttgtccagtcacaaccagtgttcaaccacaaactcagcaagagcagcagatccaggttcagcagccacagcaggttcaggtaagaggaaatatttagttggagcctgttaataaacttttctcttctctcacagtttaggatagctacaacacacctatacagatgttagaaatgctggaagttattttattgtagtgtggaatctttcatatttaatatggactgataatatctttagccattgtaaactataaagtccacagatacttatttgctttagagagcttgaatagtacagaaaagtagaggccagcactgcatttgaatgtgagagcttcaagctgtacagatagttgtgagccttcatatggttgttgggaattgaattttaggacctcctcttgctccaactctc

SEQ ID NO: 35357 - DNA, 1173 bp, Mus musculus
caaattcagactgtgggtgctctttccccaccaccatcccagcagggctcacccagggaaggggaacggagggttggcacagccagtgtccttcagccagtgaagaaacgcaaagtggacatgcctatcaccgtgtcctacgccatctcagggcagccagtggccactgtgctggccattccacaaggccagcaacagagttatgtgtctttgaggccagacttactgacagtagacagtgcccacctgtacagtgccactgggaccataactagccctacaggagaaacttggaccatccctgtttattctgcccagccccgcggggatcctcagcagcagagcattacgcacattgccattccccaggaagcctacaatgcggttcatgtcagtggctcacctacggccctggcagctgtaaagctggaggatgacaaggagaagatggtgggcaccacatctgtagtgaaaaactcccatgaagaggtagtgcagacccttgcaaactctctctttccagcacagttcatgaatggcaacatccacattccagtggctgtgcaggctgtagcaggcacataccagaatacggctcagactgtacatatatgggacccacagcagcagccacaacagcaaactgcacaagagcagacaccaccaccacaacagcagcagcagcagctgcaggtcacttgttcagtaagtaagacttaatctgtagggtattttgttttgcttcctttggttccagtgtaacctactgagtacctgtagtgtctgaattatttaattccattatgattgttgtaacaatgatagtgtatgggggaaggaagagaaagaaacagtagatgaggtggttatcattcttggaattcaacaaaatgaccagtttttagagagtattcgggtagggtgctgtcttagttggtattttactgctgtgaacagacaccatgaccaaggcaagtcctttttttttttttaaagatttatttatttattatatgtaagtacactgtagctgtcttcagacactccagaagagggcatcagatttcgttatggatggttgtgagccaccatgtggttgctgggatttgaactcgggaccttcagaagagcagtcggcgctcttaaccactgagccatctcgccagcccccaa

SEQ ID NO: 35358 - DNA, 1173 bp, Mus musculus
gcaggtagcacccctggccttaaggactggagaatatacttggaagtatactttgtgtcatgatgagcagtgtctagtcttcacatcatgagtgagcaagatttatgggattgcccaagaccagatttttggatccctatgtttttagttagcttcaaggaaaggcaccaaagaaaaatgtcttttgggaagacctgggaggtgccagtgagttgtatttaaaccagtctttgtttgggttcatttatttgctcatagtacagcatggttgctggggttttctacatatttctacttacagaaaagaaacccgttggtgtaatagcgtatgttagtgcattaatagggaagttcagatcacagatgtaagtggacattcctagcctgaacactggtgggcaacatcctctctgaaccctccttttaacaatgtgagtaacaagttaggacatcactgttgccaagactcccattcacccttaggacttgtgttgcagggcgacagttgctacgatttcaggaagatctgatctcctctgctgtggctgaattgaattatggcctttgtttaatgacacgagaagctcggaatggagaaggtgaaccctatgacccagatgtactctactacattttcctgtgtatacagaaggtaggaaacatcttcacatgaacatgtttgaactgggttcccattgaatgttttcactttagcctaatttacttaaataacaagaattcatggcacagctttcctcccagcacatggggcagaggcaggctgactgacctctgacttcctgctggccaaggctacatagatcctgctgtttgtttgtttgttggtttttgttttgttttgttttgagacaggcattctctgcatagccctagttatcctggaacccagagatcagcccacctctgcctctcaagttctttgattaaagatatacaccattgccggcctttttttccttccttccttcctttcttccttccttccttccttccttccttccttcctttcacaaaagcttagatgtttactttagaaaagaatatataaaaatacatataattccacctagaaaaccatgagttaaaatatatttaatgagggccagtgaggtggctcagcccatgaaaatacttgctcaccaagcctggtaa

SEQ ID NO: 35359 - DNA, 1442 bp, Mus musculus
acaggaagggttagaattatgctattacttactgaaattcttcttcagccctcagagtgtgaaaggccgaaatgacaccttttacctgacacctgagccagttgtagctcccaacagcccaatctggtactcagtccagcctatcagcagagaacagatgggacagatgctgacccggatcctggttatacgagaaatccaagaagccattgccgtggccaatgcaaccaccatgcactgaggtgcctcagctataggaaaaaagatccaggaaaaaccagacagactttcacactaaaggagaggcctccacatttttttttaatttgtagttatgatgcttttcaggctacttctgttcaaaatgtaaaagacgatattgccctctttgcatcttcataaaatgggcagacccctggttcatagggatctgggttttctgagaacctggtgtcctaggaagtggttggctttttcttttctctttttttcttttgtctggggcgtggggaaaggaacttggactgtatggagagatacagacccttcccttcctcagggaagatggagctgctgatgcatcagcctgtcactcggaatcggcaaactttactgaccactcagagccacatttgttttttgttttttgttttttttttttgtaatgctcagacataaacttaacatcttgatggaagaagaataaggggaacttcaattatgatttttatccagacaatttctattacacccttctttatgacaagtgacataaaagttaaagtaaaaactttaccatgcgcttttttttttttttggcctaacattgaggccttaaaaatgaggctcctgtgcctgatggaattcttgtaacatacacttgtgtatcatataaagataccactctttctcttatgtattcttattctagttgtttattaagaatgacaagcacgtcttttcaacaagctactggagaacgtgtctttatttgggggaggagctctgcgggggcgggggagtggaaacaaaacttaattgaatgggcctggatcctgctgtggtgggatgcggggaggggtgggacaggaaacaggcctttggccttgggcctgtgagctcgataagcacgtggttacccagctctgccagctccgcctctatacggggcgtggccctcagtacgcacgccctacgcctggcgtcatcgacgcacgcaacgtgtgacggaataatctagtttatattggcgcggtccggacggcagaggcctctgcggcgcggtcctcggagcggcgcggttctcggagccacgcgtctgtcttcctccgtggtcatggcggactacctgattagcggaggcacctcttacgtgccggacgacgggctcacagcgcagcagctcttcaactgcggggacggcctcacctacaagtgcgggt

SEQ ID NO: 35360 - DNA, 1442 bp, Mus musculus; identical to SEQ ID NO: 35359

SEQ ID NO: 35361 - DNA, 1454 bp, Mus musculus
aagaagctgatggggaggctgagctggtgccccagttatgtgtcctagaggaatattccgtcccctgcgcacatgctgcccatgtgacaggcgtcaagatcctaagtcccaagctcatggtctcagcctccatagaccagcggctgaccttctggcgtctgggacagggtgagcccaccttcatgaatagcactgtgtaccatgtgccagatgtggccgacatggactgctggcctgtgagccctgagtttggccaccgctgtgctctggcaggtcagggacttgaggtttacaactggtatgactgagttatcccagtgggtggagaactgagcacagggcctgactgcagacagtagagcagggatcagctgtctgtgtcacgctcagtgtgctctggggaggcgaggcagtaccatagttctcgcaagtattccagtagggtgttgcataggaggaccaagaacacgcctcactctcacaataggatgaaactgtatttattctgactttaagtgcccaacatctgtgaggtcttgtttctttcccagttgatgcttttataaacattcccagttattgggcccttagatgtggctcagcggagggaggcccagcatagccaagcctgtgtggaacacctcacgcactgccctcaaaagctgtaggcgagcaaacatctgaccaaagaggtgtggccgaggttcctgaaagaaaagcagccaggcgcatcctcatttcccgtgtgctcagccttgcccacatttcccgcagaccccccttgctgtatgctcacccctagaatatgtactcggttatagtaggagctgaaatccatgctgagctgcaccaggaacttgcatacctagagacagacgttgagtcgttgagctgttgtcttttttcttgtgttacaacccagaataaagaataatgtgtgaaatgtcttctgtgccttaccatctccgtgcggacagggatgtggaggcctggggtgccggccagactcacagtctggctcagcaggtccagaaagggaaggacactgttgaaaagcagcagccactcaccctgcgggagacaagcgtgctaggaagacaagtccaagccttgtggacgtttatcaggaccaacactcacctcatcatggagtagtgagaagtccagactgctcacaagcggaaaagtgggatacagaccttgctccgttccatgtttgtagccctcgaagagtgtggcaaggcgggcacagttatacatgacaaaagtcccgctctttgtgccctttgttgagatggtgctgtgggccaggaggagctggggaatggtaacatagctgcagagggccttggctctgtacctgcatcctccgtcctggtgtcgggaggcttacctggctctgtggggctgtgcttagcatctcaaatttgatggtagccacggagaggatgtcg

SEQ ID NO: 35362 - DNA, 1757 bp, Mus musculus
cagttacttacctggccttagctggacagccagggcacagagcagagcaaggtcgcactgcaggcttgcttttagtcttgaatgtgaggtttttcgctaagtcaggccatccagaccagcaccacagcagaggtgggctaccacacctctggacttggagactggttcagcatggtgcttccttttgtttcttaaagaaaagaaatccacctttgagaggagttgttccccagatgagtttctttttccttggttgttccttttgatccagtattcaagtggtgtactctgacctgggtcactgtcttgtgttcttatgaacagagttcatgaggtcagagttcagcatggctcttagaccaagggcatgggtcttgtggctcaagagctaggtttgcacaagttctttttctgttcacctagagtgtggccagaagctgctccagggtggggtgtgtttctctttgcctagttgcagctgccagaagtccccatctctatggtctgggagtctaaggccaggagaatccctggtttgtggtctcagttcctgtactagaaggggctggccagaagaaaggaccagttcttgcacagtcaagtgcaagggaacaggcagcttgcctggtgtccttcctatcttgaacctggtcctgtgggcctttgaaaagttagatctgtgatctctggggtttccatggctttgttcagtgcctcccctctgagactggcagagctgtctatacttgacaggacctccttgaactcctaggagagcctatagagaaatctgtgaatattatgatgcagattctttgatattcatacattttcacctccagtcagcaatttcctaggtaccatgtaaagctgtaaaattgaattattcttgaagccaggtgacagctgtgacgcctggggtacatggagctgcacgtcctctcccacctcctcaggtgttttgtctcttcatgtcatccctgacaagtgaggttgggaggtggattgggagtaatagtatagtagagtatggtgagtgaaccctaacaccaatgggagctgattgtgacccaggagtgtccctgctgcaggcccagggtggctgtgatgctctgttagcacacagacctttccatcaagtcctgccagtggcactgccgtgacacagcaccagagttgcagctctgcagcctaactcccccttggtactttctgaactgcacagctgccatcctccactcctcagctgtgaccctgaccattggcactgcaggaggctctgccaacctgtagctggtggcgtctcatctgtggaaacctttgtttttgcaccctcagtggttgtccttgttaacatcagaacatctgaaaggtcaggcagaggtagggtttggcttggtgtttttaccctgcaaagggtagagaaaggtgtttccatgacctgaccagattcttgtctttcttcaaagaaaagttgaggtaatgtcatctcgaaaagttgagtgatttattcaaaataaactcattttctgattataaagcctgtggagtctttttttcacagtgtacaggtgactgcctttgttcttccctgctccttcagggctcttgagggcccagccagacttagcactgcttttcttgctcagtgttgtcctggctatcctggaactcactctgtagaccaggctggctcgaactcagagatccgcccgcctctgcctcccaaatgctgggattaaaggcgtgtgccacca

SEQ ID NO: 35363 - DNA, 1149 bp, Mus musculus
tgccagatcaaattcctacaaattgaagatatgttcagagagtctcccacacagtttctcaatttcacaattgaaacatgacccatttgttaccccggtaataaagataggtatatataggtggcacatatttgtaatctcagtgttcagtgttggagaggcagggacaggtgggttcctgagacttcctgctggccagcctagcctagagtttatctcaaaaggggcagggacggggtgggggatgactaacccgaggaacaacattcagaattaacctctatcctcaaagtatatgcacaggtgcacacacaccaaaaaaggaagaaattttatttaggcagcccgtgttctagatgaccagatgagacgcttttgggtacatttttgtttgtggtgttcgggtgccccttcacccaactctcttgcctgggtgttggaggagggtgtggttgccttgtgaagataaatgacttcaccctctttctgtgcagacttctgctggatgtgtctaggagactggaagacgcatggtagtgagtactatgaatgtagtcggtacaaggagaatcctgacattgtcaaccagagccagcaagcacaggccagggaggccctcaagaagtacttgttctactttgagagggtaggtatcttatctcacaccagagctttcagagcaggctttccccactcggcctgctgacatgagagcacagggatgctgtgtgcacgtggggagtccttgatgagctcctgcacatgcaggcagtgcctcctacagtatggtttcctgcactggcagggcagcgcctccgacagtgtggcttctcagttgtgcaggacgatgggctattcccttacttgagtgatggatcatggtctgtctgttccatagatagacatagagtaagccaggcagtggtggtgcatgcctttaatcccagcacttgggaggcagagacaagcggcagatttctgagttcgagcccagtctggtctacagagtgagttccaggacagccaaggctacacagagaaaccctgtctcaaaaaaaaaaaaaaaaaaaaagaggaagaagaagatagagcaatctgtgggcctggctacccgccagtgtttgtcataaacttctgtgttgacctctg

SEQ ID NO: 35364 - DNA, 1222 bp, Mus musculus
tttacctgtctcttggtggaaggatttcccttgataaacatagtcaagggagggggaagggttctaaaagaaactagaattgagataggaagctgggctgggtggtgtgtagctttaattttttaaaaaagatttatttattttatatataagtacactgtagctgtcttcagacacaccagaagagggcattggatcccattacagatgattgtgagccaccatgtggttgctgggaattgaactcaggacctctggaagagcagtcagtgctcttaactgctgagctatctctccagcccctcatgtctttaatttcaggacttagaggcagatgcaggagagttctaggacagccagagttacactgagaactctgtcttggtgcagggtgggggtgggggattgagataggctgtcatgggagcagggctagggctttgatattttgattgttgaatgatttccactttaattgttcatagagagtaatactttttttcctttctcttagaagacaatacacgctaatgcatttgagaaaacgataaaaattgggggtagggaaaaaagcaactgtttctgcaactttgctggatgttaagatgtctgtggacatgaacagccaagggtcagatagcaatgaagaggactatgacccaaactgtgaggaagaggaagaagaggaagaggaccctggggacatagaggactactatgtgggagtagccagtgatgtggagcagcagggggctgatgcttttgatcctgaagagtatcagttcacttgcttgacctataaggagtctgagggcgccctccatgaacatatgaccagcttagcctctgtcttaaaggtgagttgttctgccagttcaaatgtaatctctcaggtgaaactgaaggatggtctgttgttaatcagtcactctcttgtagcttgaaacccaaacctatgtatgtatgtatgtatgtatgtatgtatgtatgtatttggatattttgtcacatttacttggttttttgttttttggttttttttttttttttttttttttttttggttttttgagacagggtttttctgtgtagccctggctgtcctggaactcactctcgaactcagaaatccgcctgcctctgcctcccgagtgctctggggttaaaggcgtgcgccaccacgcctggccacatttacttgttttaaaatataaacatgtcc

SEQ ID NO: 35365 - DNA, 1190 bp, Mus musculus
ttgttttctgttacctggttaagagaaggttccagtggctggagagatggctcggtggttaagtgcacctgttgctttgcagagacaacccacatggtggctcacaactgcctgtaactccagttccaacagatcagatgtcttctgatgttcttaggcaccaggcacattcatggcacacatacatactgactgccaaaacactcacgtacataaaataaattttaagaagagctccctctataaccaaagatgaccttgaacttccgatcttgcctctccctattgtgttttgggatgacaattgtgtaccaccacccctggctttatgcagggcaggggattgagcccagggtcttgtacatattgtctcccaaatgagatatatctccagcccttgttgtatcttcttttcatttttaaaatatttattttgttattgtatgtgtatgggtgttttgcctgcaggtctgtgtaccacatgggtgcagtacctgaggcggccagaagagggtgtcagatcttctagtattggttcagactgttaatgagccccctcgtgggtacttggaattgaacctgagtcttctggaagagcagcccaatgttcttaactgctgagcatatctcaagccccttgtatgttcttttagtaaattttcagagttagtttgggtataaagagagaactgagtcagaattatacctcaacatgaaaaaaaaatagttaatgtttaagcttctcagggtgcaggggagtgagtgagactttttgttttttttttcaaggcagggtttctctgtgtagccctggctgtcctggaactcactctgtagactaggctggcctcgaactcagaaatccacctgcctctgcctcccgagtgctgggattaaaggcacgtgattcgacaaggcgtcctcagtcttgagccatacaggttacaggtcctgaaaaggcacaagagccaccagggctggcaaggctggcacctgggagctcaggggaggaaatcaggtatagcattgcttgtactctatcaacactttagcccataacaggctctgagagagtctaagctacggatgaaggtgttgcaatgggaggttctgtttctggagtcatggtgttctgaatgtgtctagatacattaagggcctccaggtgtgagcggttttgttttattttg

SEQ ID NO: 35366 - DNA, 11367 bp, Mus musculus
tacttaaactgttactgtaaacaaatcattctctcccacaccttttttaacaatgcagttatggatgttcaagcatttgagaggcttctgggcccctgcatggacatcatgaagaggaacatctcacattacgaagaacagctggtgaagatgtttggctccaacttggatctgatggaccccgggcagtagatgtgatgaatcttggagccttctcagtgtgataccaaaaccttccagtcagccacaagaacacacacagaaaacagacacgacagaaccgctcctgctgctgtctccgccgctgccattgctgtggttaagggcatttagaaatcttgaaagtcagcactgaaagatggatggaggttccacccacacccaccctccactttgcttctgaacgccgtcattagaccacttatgtcatgagtactccaacccaggtttcacatttggttcagaatgtctctccagcaatttaagtgcctgattcaaagtccaaagcgtaacaccctcctttcctctcttgctgctaacgttgcttctgaaagttctaaggtctgcagacacctgttgagtagctgtagacagcacctccgcagtccttctcgagggagaaaatggtagagccttccgtctcgtttgtcttttagaaagtccacagtgtgttcacaatgctgctttactctcacagtggaaggtggtagcagttatactggaggtctctgccccagaggctctgtaccatttgctggcagctacacactttacagctgtgtctaaactcagaaagaggcccagcagatccgtatgggcagattgagtactaagactcacgttagcaggaaacttggattcaacactctttccagtagtagccaggaaaggttatctgggttagggtttttgttgtttgtatttagtaggtttttgttttgttttgttttgtttaacctctgtgctgtttacataaacaaattgctatccttttctaaggagccaggggtggctggttagctcagctggtcagggcatggtgctgatatgaggagccagggtctggaggtgttgtcactttatctgacctgagtacttccctgagtgagccctgcctgtccctttcactggctgatagcgggaagccagcaggaggctgtgctgcacagagaactccttcccttctagcgttactgcatagcgtgcctagaaatcatcagtttttaaactcttaacaaagaagctatttttttttaaggaaattatttctctatttagagaattcaccttggatgtattcatatacatggagtttgtccactgactcaggcatttgtcctaaatatccgttttcaaaactaggtatcattgggggtaggggctgggtgcagctcggtgacaaagcacacggggcacgtgcaaggctctgggtttggtctccagcactgtaacagccacaggaagacaagttatcatgtagaaatgtggaattactgtgaaggcctttctaagtaacagtctcgacttttgccatggtcaccatagccaagaaatgtccaaagcaggtgagttgccacaattttggtaattagtcactttttcttgtgttccatgaggtaaaagcaggactctccaggctgatctgagtagcctacgttacagatctgggaattgtacagtcgtaactactactatgaagcaggcagctagcactggaaaaccctcaaagtgatcccgaattttcctaaggtccttttctatggtattgctttattaaataaatcaggccttgtactttgacagaataacacctgatttcttgcaaaggtaagaggtgcattgggctccaggagtagcccagaagtccaaccccagaccttataaagactctgaaccctcccccaccctccatgccagcgttggataaggctggctgtgactctcctgccagagttattcctgtaggctgctagggtaggccttcgcctgccctcgcccttcccgggctaggcttcagagtcctccttgtcacccttcctgcctcactgacagctgctcttttacagagaaggcatcaagtccaagttctgctgtagccactgattgagtcttcgctgcagtgtggccctgtgttggggcacgtgtgacggggtcatgggagaggtacacggagtctgcgggagctccggtggtggtgaaagatggctgtcaccacagtgccaggccctgacagtattccaggtctctctgcagcttagagaatcagaggtgacagaccaggtttttctcacggttgcagggtccccattgtggcaggcaactcccacagcagatggctgggccctaggaggagtatcagaaagattccttaggtagctcctctcttctgagggtgcgcctttccctccctcctccctggctttgctattgatttgaaatgacagagaatgttcctcagagccgtgaggtccagctgcagtatttctcttcctttctgccccagcttagcccactcactgtcttctcttggttgaattctctgcaggacaggctcttttgttctcatcctcaggctcatagtcttcttaaagaattatatgttcctggtatagagtctcagaaatcagcattgagcttttctttgagcagtttagtaagcaaattcagcagcaaagtggcaaaagaaaaaagaaaaaaagaaagaaagaaagaaagaaaaagaaagccctgcactccagccggaggggcctcatgcaccctgactgcccagattctctgcttgtggtggcggagccgctatgtgctgctgctggtgtcccagcgccctgtgcacacagcattttatggcgtgtcacagtcttcattttaaaaagatgaaagcattttgcacagagaaagaaaagacccatgaatgtcatcttttatctttctcaaatcagttgataatggaatttttgtttttgataatgcacttgtaagccagtctccccacgatctgggtagtttttatctctcactacagttacctcttgtctctcctgtcttgactgctgacgttctccgtgattctgatgtctgtgctatggggagcagccttcccgtgggattcctagtacactctgcagggctatctttataaaaaaaaaaaacattaaaaaaaaaaaaagagtgaaaattgtcgctcacctcatgggggatttgcagaaaaccatttagcccaccttgaacaaagattagattccttgtttttttgttgctttgtttttaactcattgtaataatttaaaaaaaaacccaattaagaattattgtgctacctcaaaggtaaaatgattctaaggtcctgagttatattcatggtgtttgaaatgtctctcaattggaattatgttttaaatcattggggtaaatcttattttaacctgttttacacttgtattttaatctcaaaagaatatatgattggaaagcaaacaattcttgatctgtagccttgaacatataattaaaagtcactagaagttaatcatagtttgctgtaaacaaggttgggttgtttttttgtttgttttttaaaggaaactctagggcccggcttcactcttgactaataaaggctgacaaatcatgtctgactttcctggtgtgtctcctgttgtatatttttcttctcttgtaagggttccagacatcttagcacttacctggcaaatacattattgggattgataggacccttgaaaattagggagaagtcctggacatttgtggtaactaggttccacagagaagcaatcgatgtgggtggggtggatgacgagagaagggttctgagatgtgtggcaagggattgctccacgtgatgaagattgaggcaaggtgaatcagcaagccggagaccccgaggaacaggggtttcgttctgctctgaagttcagaggcctgagaaccaggacagtcagccgtcgctctcatctgaaggtcagcgggcttaagagttgtgaaaagcaaattcctcaacatgaggctgacagcaagagacagcatgggcaaggccaaaggtcagaaggaaaattctttcccacttgaaggaagcaaagccagggccctgcgcatgttagaaaaacactctaccattgagctgtgtccccagcctggccgagtcatttcaggctttcaaactgagctggtcgcataaggccttaccacattaggcaggtcaaagtgatttattccatttaccaagtaaaatactaatctcatccaagtcatatactcaggagaacacccataataatggttgaccaatattctataacccaatcaagtggacacacaaagtgaactgtaacagcatggcatattgctgtaggtaagatcaaggggacctagcgtaccccttcccaaaagataccagtgatagaaaccatctcctgtctgccgggatgtcactcctttgtgttactatagctgaacacgtaagcatggtagcccactgtcctttgtctttcctagagagcaaaggaagctcactggatggtaccctcactagatagagatgcctgactatagaaatgtgccaagtgatagggacatgaattacctacctaggtcccaagaatctgatagctggtcctctaaaagccaaattggccatgcctcaagtctttaaaaactgaatgttttcttttctgtggttgggggtggggtggtgtctgtgtctcagtatcatgtccaaggtcttagtcctgaagagggcatgttacatgaagattgctttttgtgtataatgaaccaagaggctaaacatttattctgtcaaatttgacttactcaggaatcttaatgacaataaaatcttataacaataaaattagtgcctttaatctcagcacttgttccaggacagccagggctacacagagaaaccctgtcttgaaaaactcaaataaatagatagatagatagatagatagatagatagatagatagatagatagatagatgatagatagatgcttgttataacacagaaggaaataggggctatttcgcaaggcatcatgacaagtgtaattttggtcctttggagttggtggggtttttgttgtttgttcccttgattttcgagaaggggccttaggctgtagcccctgctgggcctaaacttgtaacagtcctgcctcagcctcctgggatctaggcatgagctgctcgctccctgcgtccagaggtaaatggaaagttttgctgtatctgttatctgtaaagacaggtttgcctcgttacagattatggcagatggcacacagcttccttactggttttgaaagtgtggatccgagtgttaggaacataaaggatatctaatcctgaatttggatgacaattgccaagttctgaattgaaatgtcatatgttagatgtgatgttgttcgtggctttattggacagatcctgatggccaattgtgagtgtccttgacactttaagccaagggtttcaacagtaatagtactgtggtccaccagggggtcctagagccttttaccattgctgatggagttcattgcttgtatttttggactcctgtggacggcagccatggcttccactttaaggtgtctactgtcttaggctatgaagctagctagctccccccccccaccctttttaaggttttgagtttttttgagaaggtcttgtgtgtgtgtgtgtgtgtgtgtgtgtgtgtgtgtgtgtgtgtgtgtgtagccctagttgtcctaaaacttactctgtagagcaggctggccctgaactcaaagatctgcctgcctctgtgctgggattaaagccatggcactatcgcaggccttttgcctcttaagtggtttaaacacttaggcacacagcgcctcctccttctccctcctttcatgtgatgcctctcagaagaagcaaaagagaagactggattggtaagagacacagactcctcaggaattctcgtcctcgtttcacatcacttgaaactgaaagacccacaacgtgaggactcccccacgttctgactcaggagaggcgacaccccaaaatcacccacaagaaacgggtcttgctgcaaattgcaagaggatttttattcaagagcgctctcgggcccatggtcatacaccacgcaggggtagaggaccgtggcgccccgagtagctgggtaagggggtatttaaaggaagaaaccgaaactcaaggaagtggggagggcgttgttggaagataccaaagataccagttaagagtcacaaggaagtgtaaagttacaagagtcacaaggaatacctggtaattgttaactctcaagacagcttctaagagcccctaacaatagcacatttgcattgcaggttctgggtgactttctttgaatgagcactctttgaacccaggaagcgggtgggtcgctatctcttttatgattagcatacctttacaaaggccacattcccaagcctgggcctaaaggcctagaattctgtttttacgttgttgtactttcaaaacttgacaacggttggccagagatgcgcttttggccgaagttgctttctgttcagacaggtggccaagaatcaagttttcttgtgggtgtccattttgtgtgaccttgagctgcagctctgcagttttccacttcggtcagcagggggcaggctatccctgactccctttgggctcttggccttctatcctagaactgcagccaatcccaagtgagaaactcaatctcatccaagtctcaagtctccatcagcctccaaatctcagctcagatcccaaatgagagacagttccccaggcaaccacagcctcgagcagagcacagtgggaaaacgtgtccctcagaccttggcgtttaggtcaccatcccaagctcctggcggacgctgcccaaaggacaaaagggaattctgatctgggcctcagattgcccctctgggaaaccacatacttaccagagggtagctatccgttctgccctagcttgttttgttttgttttggtttggttttggttttggttttcgagacagggtttctctgtagccctggctgtcctggaactcactttgtagaccaggctggcctcgaactcagaaatccgcctgcctctgcctcccaagtgctgggattaaaggcgtgtgccaccacacccggcctgccctagctttgcctagacccttgccctatcagctggtgactttagtaaaggttagttagggtccaggggctggtttgtttgctccttgtgctctgctcaagactggaatgttctggatcatagcaaaaccagcccccactgcctgatacagagtggaccttctaatagttaaccaaacaagctagttttactaaatagaaggccaggctcagggtcagcaagagaactcaatgggtaaaggttgtcaaacctaacaagctgaatttagttctctgcaagaatttattcctgcaaattgtcctccgaccttcactccccatccctctgtgtgtgtgtgtgtgtgtgtgtgtgtgtgtgtcattaactcatatatctctcccatccattcctatacaaaatttaaaaccttaaaaatgtatttaaaaaaacaacaacgcaaaggcctggcacacagtgtgaaggcaggggcgcattgagagtgtgggtggaattggggctcacagactgggcatccatccagcacaatgggaatctttcagctggcccctcagggctgtgtgctgcctggaagcactggggacattggggacattggggacacagtgtgcatgtctaagatgtgctgggaaccgcctccaccctggccctgtggaacacttttcttggtaattttcctgttttgttctgggagaatatcctagcgatgatttacagcagccagctcccttcctgaatgacccatgatctgtagctgtggagagggatgggctcagaggagacacgaatatcacttccagccccagtgaggacactgtgtctctagccttgagttgtgtgtctgatgccaggtaccagagacccagggcagactttacaccatgaggactgggaggaaaggcacaaatttaggagcataaagggaaggggattctgataaatgacaggtcccaagtcaatattacctccttccaggctcagatactagcaaagaggggtgcttcttaagtccccagatacagccagaaaagggcagagagcagcagcctaacacaccagcccagagaccagatttgatctcaccagactctgaagatctccttcagtatctgctagccatccttctccagggtcctgaaggccacgcgtaacatcttgtacccctaccatgatgccgctaatgaccttatcatgtttgcaggggcagaaaccaagccatgtgctgccagtgtcagaatcctctgtatctgctaacgatcctatagctcctgctccaagactcggcctccttcttgacaccatcctggagacttgcttgtgagtgccacgccattacccctgtcacctctcactctttccacaccctatccatgcctccccaaagacttttagtgacaaccagtgtgtgtgccagctgagcgatgcgcatctctccggtttccttccccatcccgatcactctcctcttgagcagctgcaatagacagaagccgcaggggtctgggatctcccttctccttccccaagaacagggatggcttggagttttatcgccaccaggctgcagggccatcttagacataggtgctcctcggttctgtcccctactctctgtcaacagcagccgcagtccacagtggtcccattaaccccactgctctctcactcttggccttcattctggctcctagccccagttttagtcattcttcaggtcactgggtagggtgagtggtgcaggctatcagtgtctatacaactatcgtttgtatctacatatctttttgaatgggatgccatgtcaccctgggggtggccttgaaatcacaattgtccaaccatggccttctgagcctgctgctcccttctaactcatcctcctccatctgctcttcttttcttcttcctcccaccccccccccaccgcctcctgttgagatggagacttggctatgcaactctgcctggtttggaactcactatgtagaccaggctggctgtccccaaactcacagagatccacctccacctgcctctgtctcctgagtgctggagttaaaggttaaaggcatggcactacaatctctctctccccctcccccctccctctcctactcccactccccctccccctttccccctcttcccttcttccctccccctccccttatagcgattctccagtcctcagcaaaactctgagatgagaccatacttgacatttctctttggatatgggggagccttactgtttccttgattgaacttgagttcctctcaaaatcaaaacaggctgcagaggtagctgttggtaacatacctgctaagaaaacatgagagagaactgagttcaacttctagcactcacattttttaaaatttattttttatgcattgttgtggggctgtcagattcctggaactatggttacagacagttgtgagctgccatgtggttgctgggaactgaacccagatcctctggaagagcagccagtgttcttatccactgagccatctcttcagcctccacatttttttttaaagcaagccgtgatggtacacatctttagtattggtactactcaggaggtagaggcaggcaggtctctatgagtttgaggtcagtctgcatagtgagttctaggactgccacacttactgagtccctgactcaaaaacaaaaataacaatgaaaaataataaaaaccacagggcagggggcctaacggacgactcagcaggaaaaggtgcttgtctggcaaacctgaggacctcagtgcaattcctggaaacccacggaaagggaaaaggttggaagcaacttctcaaagttgtctcttcgtctccagatgtgcaccatggcacagatacaccgccacacacaaaacaaacacacaatagtaattttttcattttcttattctcctctcatatattacatcccgaccacagtttcctctccctctgcttcctcagtttctcccccaaaacatgcacaataatgattttttaaaaaggcaggcccatggctgtaatcccagccctggaaaggtggagacaggatccctgggacttactggacagaaaaatcggcacgatccaggttcagtgagaaaccttgtttcaaactaagtgtgatagagaaaaattgaggaagataccagatgtcaacctctagcgtctgcatgtgcacacacatacacactcacacacacacacacacacacacacacacacacacacactcacacacactcacacacacatacacactctcacacacaaacacacacacactcacacacacatacacactcacacacacactctcacacacacacacacactctcacacacacacacactcacacacacacactcacacacacactgtcaagaaaaggtgatatcagcttcctctgggcttgctgtcttttgagacaaccatcgttagaaccttggcactgtgttttgatgagacccagaacagaggaaaaaggcaatgtgggtgttcaggccccaagcaaagcctcccgcctgacgtcagtaatgggatctcttgcctctgaaacaatagaagtgagacccagccagatatgaagaacatgacaggcaaaagccgcactgggacttcagcccaaacgggcaagcagagggaagggtgacactgtttgtgaaggagaccagagtgatggctgagccaagggggtgggggtgggggaattttgttgaattgttggcagaggggctgctcatcttgtaactttccgttggctatgggtagagtttcaaaagctatttttcttcttgtgtacaaatgcgctagtggctccattttttttccttcagatttataaggtttaaaatgttacgtgtctgtgtgcatgaatgtgcatgctggagttcaggtggatgtgagccgtctgaccctggtgctgagagccaaactcaggtccactgcaagagcagccaggcctctctccagcacccactctgtcatggtgcataaacatccgtgtctttgggtttactctgggccttttggtgggatttcctgtgtctgagctgctgaaagaaagcacaaagatgccgggcgtggtggcgcacgcctttaatcccagcacttgggaggcagaggcaggtggatttctgagttcgaggccagcc

SEQ ID NO: 35367 - DNA, 1174 bp, Mus musculus
ttctctggatgcgtggctggaatgattcattcattctcttctccacagctttgagagccatttagtgttgagtaaaatagagcagtgtgagctgctttgttgtcccatagtctactggccagtagtggtcagtccccctctgggggcagttgcagtaccattccaggagttgctgaaccaggctgctcttcctacagctacgcatggagtacctctccctgatgcatgctgtggtccgctccacgccctacctgcagcaccgacatcggctgtcagacctgcaggctacactgcggcgcatcctgactgaggaagaggcctcaccccagtgccagatggaccgtatgattgtccaagagatgtacaaggaattcccggacctgggagaggttcccagctagcacttctctttactcccttctctgcagccctgggagggtgcagagaactcaggggcttggctctaaggatgttctgcaccgacactgcgaggtgataaaagattagaagggacctgagccgggccccttacctaaaggagagtcagggtaaggggccagatgtaggattggggaccacagtctgggaactgtattggggcagaggaaatgcgcaaggctgaataccctctgtttgctggtaggctgcctcttcagcatgccacccccatcccccactcccatgtgcatacccagagtcctgctgctgctccaggctgggctgctgccatccctacctgctgtctggtctgagtcttgaccctcagcaagccatgtccttagggtgagggaggcaccttctgccagctctgttctttgccttagctttgcagtgagtgttgctcatgtgcagcccttcccccatagggactgctgtcccctgaccccctgctttcagccccagaggccttggccagactgttgccttgaaagtgggatcctagagacaggccatccgtcctgcagccccatggaacaggatgatggtgctgagaaagccaatgatagaatctattttctctggaaaaaaaaaaaagaataggccaaaagccatgtgtattttcctatgtactacagctcaccttcagaaataaattacaggcaccaggagctgggcttccctgtatgatgatgcggggagacgacggggagggtggcgggggctcaggacctca

SEQ ID NO: 35368 - DNA, 1169 bp, Mus musculus
caatacagcatgaatagcaataccgctagtatgcatagccagatgtttcaaggatacccatctgccctctgaacttgagaattgtgaacaggctgtcacatccatccaatattcacgtgggtgctggagatctgaactctagtcctcacacttatatgagaagtgccttagctgctgagccatcaacccagtctttcccccttttaatggaagaatagcacaccatgataagtgcaatattcaaagacttgcaccttttcattagtttcctggctattcaattactttccattgtaatgcttatttaatcatttatccatatatctactgatttgtgtatttttatagatttatttctttatcttatgtatgtgagtacactgtagctgcacatagttgtgagccttcatgtggttgttgggaattgaatctaggacctctgctcgctcctgttgaccccgcttgctctggtcagcccaaagatttattattattatatataagtatgctgtagctgttttcagacatgccagaagaggacgtcagatctcactgtgggtggttgtgagccaccagatggtttctgggatttgaactcaggacctttgtaaatgcagtcagtgcttttacccgctgagccatctcaccagcccctgatttgtgtatttttattgacttatatatgtattcaacatgagtccttaaattttatacttatatatagtcagtcagtctgtctgtccgtccgtccatccatccatccatccatccatccatccatccatccatccatccaatctatcatctgtccatcaagatctatgttaccttaacatgaataactttcctatttcagtcttcaaagaggctgagtctgtaggatcacaggactgcagtgggttggttaatattcttttgttgttgttattgttgctattgttatttgaaacatggtctcactatctagccctagccaacaggtaactgatatcttactatctcagcccagtactgggactgcaagtatgtaacaacacacctggctggctcccttcttaatattgccactgaataagaataatttgttcactggaactgggtgtggtagcacacactttaaatcccagcactcgggaggcagaggcaggtggatctctgtgagtttgaag

SEQ ID NO: 35369 - DNA, 1169 bp, Mus musculus
tatatttgaccccgcctctactttatttgaccccgcccctcgtccagctccttcgaacccctccaagtaccacatctgataccctcctaccctttactttgatcccaccccaccagccctattggtctgataggcatccctgcttttgttgggtaggctacctagatttctggcttgatcttagggtacctcagtagctaggactttggctttgcctgactcctgaaagccccttctagtatcttccctaatctctgggtacaaaagggaggggcctgtctgagcatatatatacgtatgtgtatgtgtgtgtgtatgtatatatatttcccatgctgcagcaagttctccaaacctaggggcaactcattcccaaaccattcttctgatagaggggacaaagcatggtcacacagggctagaagcaagccgttctgactctgggctatgcctggggtttaccaggtgcttctccttcggtgttgactgtccccttcttctaggacaccatggccatggggggtgagctgcagggcctgaaagtaaaacagctccacgtgggaggcctgccccccagcagtaaggaggaggggcatcagggtctggttggctgtattcaggtgaggactgtcatgagaacatggtatggggtcactggggacctgagaaatagcattcaagtacatgttggcatgggagtggggccaggtgacacagagagaccagagacaaatcacaccttcctctgggggaagcaagagtctagtttagaaaaatcaagggtcatctggaatctatgttagaaacagcacagtagggatccttgtgtggggtcgatgggggatatttagagggtgggcttgtagaaggaatagagccttcatgtcagggaccatccgactgggtgtctggttccataggactgccttgacgtgtatctcaccctctgctgtctgtgcctatagggggtgtggattggcttcacaccctttgggtcctcagccctgctacctcccagccacagagtgaatgtggagcctggctgtactgtgaccaacccctgtgcatctgggccttgtcctccccacgctgattgcaaagacctctggcagaccttttcctgtacctgtcggccaggtgggtgttgagagagttggggaaggaacctg

SEQ ID NO: 35370 - DNA, 1149 bp, Mus musculus
ccccacccctgcacctgtcacacacatgctcacagacgcacacaggagggaccttccttctgcactgaactgaggggagggcttgaagaaggctgccttgcgatcagtcctgaaggctcttcagtcagcccaaatcctctgcaacccctggtggctcctcattcgctggtcagcccctcaggagtgaccctcgcttctgggaactctgtggagttgaatgtagaagtggaaagccatggttcagaggagggaccttgcctctcagccctcagcaccttcatgcctaccccaggactctgagccctccctccacacacccatcaggaccctagactcattagcaaggctacttggctgcctcagtctctcagtgctcagcaggacactgtctatgttcagatactaaattcagcatccagtaaggcagataatgtgacaaatctccacatctcaaggagttcatttctctaaactccctcaacagaggagatgagtgtacagcttgtactgtgccaaggtcatggcagaggagagacagaactcaaactcaaactcttgtgattctaaggcctgaatccttcctcagttgcctggcactcaaaccccaaggcttgacagactgtaggggactgtctcctaattacctttcagcagccctcaggacctccaggctcccaaggccctgcccctccctcctttatggcctctctcaacgctggggtctttgctcgatcctctgggtccccttgccccatccccagagacccattttccttacagctgtctctcatcctgaagagagcccagaacttgtcctggcagtttcagagagagagagagagagagagagagagagagagagaagaagaagaagaagaagaaggaggaggagaggaagaggaagaagaggaagaggaagaagaggaagaagaagaagaagaagaagaagaagaagaagaagaagaagaagaagaagaagaagaagaagaagaagaagaagaagaagaagaagaagaagaagaagaaaggaggagagagctcctattggctaataagacctggcaactccctagctgggtcctgcttactgagagtcccacaactcttccctcccctcccctactttccttctcagattcctgtgtctcc

SEQ ID NO: 35371 - DNA, 1099 bp, Mus musculus
gcagaggcaggcatatttctgagttcgaggccagcctggtctacagagtgagttcccagacagccagagctatacagagaaaccctgtctcaaaaaaccaaaacaaacaagcaaacaaaaacaaaaacaaaacactaatgtacataaaaataaattagttttaaaagaaaataaggcagggggatttctgtgagttcaaggccagatgcttcaaagattagcaccagaaatgctcctggatgtttctgataacccgtgagggaatagggcaggtaaaagaggtgtggcagtatgattagtcgtttggctccttccccatatctgtgaccctcttgtccctctgattgtaggagtcttaatggagcagctctcccccacattaccatcaatgagggcttacgtgaaacctgtgttgttactcagggtatgaccaggagctagactgatggctggttccttttgtgggtgctctcttgtccaggtgggagtgtggattgacgctggcagtcgctatgagactgagaagaacaatggagcaggctactttttggaacatctggctttcaaggtaagtctcataaagtccatgtttccctcagattagggcttcctgtctcaaaggccaacgatctaaaaattagtctcctgattggggacctttaggggcatggtctcaggctgcccttctggaaggagccaaaagttcttgtgagtgagtgcttatctgatgagccctgtgtaaggtcagtttatcacagcagggaaatacagaggctggaacttagaacagcagtcacatcacatccacagtgaaggacagagacactggctgcaaggatgcctgcctgcctgcctgcctgctgctttatgcccatctagctgtcttcagtcttagatcgtttagggcctgctctctagagaatggcgattcccatagagtaccctaatttaagtagtccctccttgagattctccacagtgactctaggttgtgtcaagttggtggttaaaactaaccttatcagactaggtttgtcatgtgcctgagcacgtggaggacttaatgaactcgcacatgtaagcatatgcattataacaa

SEQ ID NO: 35372 - DNA, 1267 bp, Mus musculus
cctcaggacattggcaaggggtccagcatctcccatcctttctgttttcccaggaggcctctcagccctgccatgtgttgtttcagattttccatctcgatgataccctgccctctcctctcagccctgacatgtgttgtgtcagaccaccatcgccatgatgccctgccttctcctctcagccctgacatgtgttgtttcagatccgccatcgcgatgacgccctgcctttggcccacgtggccattgcagtagagggacctggctgggctaacccagacaacgtgaccctccaagtggccaatgccatcataggccactatgactgcacttacggtggtggagtggtaagtaccaggaacagccagtgggacttgccctcagcagagggtgctgggttgcggtttatgagttatggagcttaggatatgtgccacagatgcttctgatccttgcctctggcagcacctgtcaagcccgctggcttccgttgctgtggctaacaagctttgccagagtttccagaccttcaacatctcctactctgatactgggctgctgggcgcacactttgtctgtgatgccatgagtatcgatgacatggtcttcttcctgcaaggccagtggtgagtctcagttcagtgctgcagcctgagacacaggtcattgccggggacactgagcgtcacttcaacctcacccccaccctcccacttgctttaggatgcgcctatgtaccagtgctacagagagtgaggtgactcggggcaaaaacatccttaggaatgctttggtgtctcatttggatggtaagtcctgcatcctctagagagggatacagcatatcccagcagtgactgttgtgactcaagctgtagtgtggccatgtttagaaaggagaaccatggcatgtgtggtgtttcacccttgtaattccagcatttggaagataagccaggaggatccggagttcacgattacccttagctacaaagtgagtgcaggaccagatgatagtataggggaccttatcttaagaagaagaagctgggcaattccagcactctggagtcagaggcaggaagatctttgtgcgttagagaggccagcttggtctacttatcaaattcctagccagttaaggttacatagcaagaccttgtctcaaaagaaaacaagaagaaaaagagggagggaaagaagaccacagatcccctgccaccccagatgtgggtgtttggagcttcaggtgcaagtggggctagcc

SEQ ID NO: 35373 - DNA, 1714 bp, Mus musculus
gagcgggaaagggttgataaccaggaacctgttttgactaagcgggaggggcaggcttggcctcttctggcctagggagctgtaagattttaactaatcaggattctcgttgcagctgtcgtgaccaacaccacaactactaccgtggttcatgccccttaccctcagcctcaacctcaacctgtggcccccagctatcctggaccaacataccagggctaccatcccatgcccccccagccaggaatgccagcagcaccctacccaacgcagtacccaccaccctacctggcccagcccacagggccgccaccctaccatgagtccttggctggtaagtatcactgtggattcagtaaacctgcatggtcccccaactcatgcctctgctcctcgggtcctttcctcctggcttgcctgcccacttgcgttgcagcccagtgtccccacagctaacccatgtcctttctccttccaggagccagccagcctccatacaacccgacctacatggattccctaaagacaattccctgaacctgcccccagcctctttggctgccatttatgtcgtgtgtgagtgagtgatacgcagagttctttactgctgtctgtggtgtgtgtgccttgtctagacatgtggcttcctctgctgttgaccaggtaggcgcaagtcttaccagtgtgggtcgggaccaacctgttttcttcctcacttgaaattgtactttctgaaatttcaagcaaattaaaaacaataaggtaggaggtatttcccacgtcaccccaaggtgaccagccatggcctgtcatacttaggagagcaagctttttgcgggtacagagcaggctttggggggtaaccagctagctgctgctaggcctttattcccagggtttggctgcattggcagtgaggcaggtggctgggggtgacaccaggtgacaaggggactcagtggcagggggtcacaccaggcagaacaccatacactctccatcagctgtctgtctggatgtcactgtccttcccggggctgtatagagggccacatgtgttcactattcaggctccactgggggaattttcctacctttgctggcttggctcctgctcccaggccagggacctcggtctgtctactacacactctggtttctccctgcactgtctttttactgttagccaaacattttgcctgttttctgtctccagatgtgtgataattggtgtgaggttgaaatccctggttcctggaggacagacaacctgacctccgactgtcagtttcccttgacaccatcttcatagaaatacctgactcctgtaccacagtccagtttgtcccagtagcagggacaccaaggccaatgggttatctggaccaaaggtggggtggagggcctaggtggtatctccggcccagatgtgaatacctccatattccctgttggttcctgtttcactggctgttttagctttgtgttgattggtgtttctgagcattcagactccgcaccctcatttctaataaatgcaacattggacccgcttcccctttcttcagcgcctaggcagctggccttggctctacaccaaaaactatttctgtctacttcttgaacttgtttcttccctctgttaattagcctaacaggtttgattgtcctgctaagagagcaggagagagggactgtacctcatccctagggc

SEQ ID NO: 35374 - DNA, 1137 bp, Mus musculus
atgcctttaacctcaagaggcagaggcaggtggatctctgtgagctctaggccagcgtagactacacagtgaattccaggccagtcaagtgagaaactttctctaaaaaataaacaaaatagaaacaataaacaatgttgcctggaaacattcacccattgtttaagtactcgctgcccttagtgaatagcatgtatctttcttccagggtctgcatttgttttggaaaaagactgagatgaaactctgctttgctgtggtcctgattcttggcaggaacaaatcactagcttagaacttctaggataggcttgaattcgagctccttggtaagtcagaaagtcagttgcttctgcttagccagaaggaaatatattagctgccacatcaaagtctaggaatttaggaacatagtagggcttcagatgatgtaaaccagaaatctcagattcactgttatgaaacctgttgctctatcagcagaggttctgactagatagactcatacatttatttttttcttttttttaaaaaaagatttatttatttattatacatgtaagtacactgtagctacctcagacaccctagaagagggcgtcagatctcattacagatggttgtgagccaccatgtggttgctgggatttgaactcaggaccttcagtagagcagtcagtgctcttgactgctgagccatctctccagcccaatactcatacattttaaaactccagagcacagttaagacttgggcttcctcagttgggcataaattgggaggctggtacatcaaggttaccataggtccaaggccagcctgggctatatagtaagatcctttttcaaaaagccaaatgaaagataagataacgtcatctcagacctaaaatttttaaagaagcagactatttccagaccagttctaaaaccagagatgataagtctcatttaagtcacagtcagaggtagggaagggagatcgtgttcaaagaaaactgctaggtaccagtctctgtcaccactgtccttggagcgtgttgatgcttgagtcaggggtctgtcctgcaccccctttccagtgtagggagccatgggcagaagcttcagtgtctgcctccatgacctcttccagca

SEQ ID NO: 35375 - DNA, 1151 bp, Mus musculus
gtaagtcctggacacaggccaggggtgactgctgggaggggcttctgggcagatactgggacccatatgtgggcgaggcactggttttctgactgccagcctcaggtcctctttgctgtcacagcttgtgaaggttcctgtggctccttgtgctcagcatctggactgtgactcttgccttgctcacagggacccttattgcggatggtgtgtgctcctgggcaggttagtgttctatctaccaaatccccgacctgggcttgtgcctctataacggcttcttgaccttgtccattgactctcagccgctaacatgtgggtacccagcccccagttctttatccactcactgcccagagctttagctccctgccatagcagacacaagagcctggtatcaacttcacgtgagggctgtgaccagggaagtcctcaggactagagagatgtctctgccgtgtgacttctcgatggctgccggagggtcacagttatatgctggttcttcttaggtgtagtcgccggtcggagtgctcaagggaccagggcccagagcagtggctgtggagcttccagccggaactgggctgtcttcgagtggtggccgtgagccctgccaatatcagtcgggaagagaggagggaggtgaatgaccagagtgggcggggccccagtggggagagctatggagatggatggagaccttggatttttgtgtcgttgcatcaaataccacatgtccttgctcagctatttctcttgggccttgggtttctctatctgttatcaatcaaggccagagagtatttgggagggatgccagcaccagcctgtacttgatgcccttaaatgagagtctgtagcctaccatgcagtggtgcctaaagtgtgccctttgctttctcggtaggttttcttgtcagtgccaggcctgccatctctctggccaggggagtcatatttctgctactttggagaccaacagagtcctgctctactgaccagttctggtgtgatgtgtccctccccagaccccagtgaggctccagtgctgcagagaggagccggtgggtgagagaaggggccagccctggacctgggagcccacccctgcttccatcttgctctaagaggtcttactgggatgagaa

SEQ ID NO: 35376 - DNA, 1202 bp, Mus musculus
caggcgactgttctgttttcaccctcaccagtgagacctacagtcagcctcaccactatgtctttagtcactgaattcccattgactaccctgcccaaatgctatctgtggtgaccagataagtctcctctgattctcttggtcctgcctttcagatcatcactgccctggaggaggatggcactgcccagaagatgcagctgggctaccggctccagcagatcgccgctgctgtggaaaacaaggtcacggatctataaggaccagggagtctttgcctgctgttgtctctgtacctcctgggcagccctggaatctcaagggagaggccaccaccttcgtagatgcctgtagtgactgacaagcagagtttaatgaaaggtggctcccagtctcttggtggcaccagctcatagcctcagccccattggacctgccttgtaggcctgggacctagtggttcagtgggtagtgctaggcctgccccaagcctggtgactctctgacctacttcctgggtgacgccagcctgcagggagctggggacttaaggtttccagagaatgtctggtaggccctccaggcccctggggagactgtactgttcttgagcactgacctatgtcccattgggaatcacagaggaaggaagagaacccgcccgcccacttcctgtcttcttcatccatcctccttgacctcaagtttcgcttcctttgtccttgttccctgttgccaattcccaggagagagagaggggggggggagagagagagagagagagagagagaaagagatgcatttctaggctgctgctgcctcagcagggttggtgcctcaggaccaccctgtcttccaggtggctggtggggagggacagctgcttcaggggagccttggggagagcagtgacccattgatgctatagctcttcattaaaggataacacatggtatggactcaccagcccctctgctaagatagaactggcagctgctgggagatgtgggcatcgtgctctgaagggtcccctgacacccacggaaggccaccatgaggttggcaagctctctccggctcctaggtagggtctgccagaggcaacactccccagaaaggagaacttaaagcacaataaggctcagggagagttggggcctgagatgtggggttctgtcccccatctttaaggggtccacctt

SEQ ID NO: 35377 - DNA, 1151 bp, Mus musculus
agacatgggctgatacaattccaagagtcccttcttgctgtcttttagaatctttgtcttcaagatcgcaggagccattttggttttcatgccaggggtaatcacagtgactatttctgtcagatcccatcttccccatgcctgccagatgtggggaaccacagtcacagacggccagcagtcaggccctcttttgggagcatgtgaactttagtactaatgatagttgtcttagttcagattttatcctcacgcagaatggttttgcctcccccagtggctactccgaccaactatgttgttgacagtctcagagaacagggctgacagggggaatgaggtcttggctagacttcagacagatacaggaagggaggcaccttttaagtcaacatggcagggatggtgacagagacacacctctgctccaggcttgagcttctgcagtctttgggagtcctctgaggcggtaagggttcctgcagaggaaggccgtgtacctgcgtgcttgggcgtgtgctcatgggatgggcgagtatggaacgtgctctgagtcactcctgtctcaccctcacagaacactgtgatagaagatgtcatgaaaataaaaatgttaccacttcagagaggaagctaagtcttcactcgattgccacggctgagggtggcaaggccagtgccaacaggacttggcggtggctcacctggggcccggccagtttcaatatagactgtttgtaatacagtttgctcagtctctcccccttttcactctcactttgcaaaggtatgccctcattgtttcccacaaagtgtgatagtgtgctaaggtcccacgtttctcatccccccgccactttaaacgctgggtgactgtccagatgattagatacgtatgaatcccagcgctcgggaggcagaggcagaggcaggcggatttctgagtttgaggccagcctggtctacagagtgagttccaggacagctggggctacacagagaaaaaacaaaaaaacaaaacaaaaaaaattctttatgagacagggattctatttctccctggctggcctgaagcttgctgtgtagaccagcctgacactgaactcacagcgctctgtctcctgagctttggaactaaaggtgtgcgtcac

SEQ ID NO: 35378 - DNA, 1099 bp, Mus musculus
ctcaaggcctgtctgggcaatgtagtaagatcctgtctcaaagtgcaaagagcacccgactgctcttccaaaggtcccgagttcaaatcccagcaaccacatggtggctcacaaccatccctaatgagatctgactccctcttctggtgtctgaagacagctgcagtgtacttacatataattaattaataaataaataaataaataaataaataaagtgcaaactcggtgatagagtgctcgtgtggtatgtgaggccccaggcagggtgaatccctagaacctcccaaaaggaagaaacttgttggttagcttttgatatggaatctcattttgaagccctggcttgcctgcctgcctcatgggtgctgggttaaaggtatgcgctgttgctcctggtcaaaacttaatttttgaataacgttcttcatacagtggactagagctctgtagttagctgtgcctgctgagttgctcggatgctagaaacactactgggaatgagtgctgcttcataccagcagtttgcaggacttccccccctttaggttagctgtaatttcccctgctctcctttttgacgttaggccttaaatgaacggatgtatgtattgtaggagacatcttggggtttgggttgggttggttttttcgatctggggcgctcctgagatcagagaacactattcttgtatatgctacaatgagaaccatgccatgcccctactctaggttgagcaatgtgaatctgctcatatgaatatctctttattcttatgtttacctttttgatctcattacagccttgaaatttccctgacgagaataaattccctacctgtaagttctgttgttttgagctaatacctgtaaattgctccatcaaacacctttccctacgatgagaaagtgggcattgcttttctacatccctgtaaacacataggcagtaaggtattacctagaggaacttcaacagtaacagcctcttgtggactttgtactcacctcagttttatcaaaccaggaaatgttctttttatgcaaatgttactagggggttggtatggcactatatcatacctgccaagaggtcaat

SEQ ID NO: 35379 - DNA, 1159 bp, Mus musculus
ttgttttttctttttctttttttttggttttggtttttcgagacagggtttctctgtatagccctggctgtcctggaactcactttgtagaccaggctggtctcaaactcagaaatccccctgcctctgcctcccaagtgctgggattaaagacgtgtgccaccaccacccggcttgacacttgtattttcaacaggtttagctgatcacagcctttagcacatggccttagttctcactgcaagatgagctcaggagccagggagtacagtcccctctctgactctgagggtgctaggttcacacggtgcacacacactcactctctctctctctctctctttctttttttctttcctttctttcagcagtccacctaagcaatcaaagtggtctagagttcttgctaattttgtctttcagctatcttcaaatgaaagtgaatcaggaaatttcagtcctctttttataccccagtcacctgtaaaagccactttgtccgatgaggatgatggcttcatagaccttctggatggcgagaatatgaaggtacagtctgtgggtgtgggcgtgtctgttcattctaaccagcctgcagaagcctcctaaaaaacagttcattttgtgagagttcattgagtcttctgtctgtttgactaaatccagcagggtgataggtcagataatactggtaagatctttctccttaccctgagggacactaacgatagggaaggagaaaggttttgagatacttctggaactaagatatagcatgtgcttaggggagtgtacaaggccttaggctcaatcaatcccttgtaccaagaagaaacaggcctgctctggtgttccatgccagaaattttaacattcaggatgctagccaaacacagtaagactctgtctccaaaacaaaacacaaaacttcttatctaggcttatctggcatttcttaggagagttacctgcaaaacatttggttgctgggtctttttcttcttcctagcccctctgctagatgtatttaaaagcagttttctcttgctctagaatgatgaggagaccccatcatgcatggcaagcctctggacagctccccttgtcatgaggagacctgcaaaccttgtaagttactcggcatgtggagttctgagga

SEQ ID NO: 35380 - DNA, 1752 bp, Mus musculus
ggaggagagggcctcgtggatgactcttaactttaatttattcagcttcatcaattattttattattgttttaattcaagacttttacttttctgcttcattaagtcaaaatactgccattctaggtagagttttatcatcctaggagctacctctacttttaatttaaaaaaaaaaaaaaatggggcagggataagaaaaaggcaaacttgttaagttgtgaacagcgcaaggagctcagtcacccctaggaggcgctgcagaccagtattgctgctactcaaagtcaaggactgagatgctggtaagagcctgcaccagatccaggcttggctacaggacataagctaaccttcccagacctacttctgcattttgcagtgttcctcggggaaagtcttgtctccactcctcaccccacgtccccatgacagtggctggtgtaggagtcacaggaaggcactttaggcagcttccatcaggccagtactggaatgctgtagtgtgccccaaggtggaagagggggggcatgaaagagtggagtccacagagtgagggaggagcatgcccactgaatgtccttttaaaaaaaaaaaagtcattttatgagtcggaatatccaatcagtgttgggtgggcacccaagggtgagcaggggggcgggaagcccaggctgttatgtatcctggcctacagacaactgtggaatttctcaggagggcgtagtaaattttgaagtcaaaggttcagagtttatcatgttttaatttgagggtcagagagtggtgaatcacatcagttaccccctaatctaatcccatggaagtgaggctctcggaaacacctctcgtctgaggggccaggctgctttgattctgcacagcctgttttggtgcctgcctgttgatatccttggacaccagcctctctgctatctttgctccattggggtctagccaggtttttcttaggaagagtctcccctcttccctctgctttctattctgggggcggggagggaatcagtgatattgaagatggctagttgctttgttatgggtttgagttgcatttggctattaaacaaatcttgtttgaaaatatgtggagagcaagggaatgagcagccccttccctggcgtgttgaagtatgtcccagttggtccctggtctggtttgtagagattctgttagctgaatgctttccaggagaatggcttgcagattgtaccagcatagctagcattgttaaccaacagttgcaggctctgcaaataaaagtgatcttgaacccttgttctctgcctagttcctaatatactcaactgggagtctcatttgcctttagggtcccagggtcacatagctaaattaagccagccatatttcttcaagaggatattaataaaaaaaattcagtttgcctttaggaatagccgaaacaatcccccaaaaacaggcggttgacaggatgaaatggccttctaggtcagtcagagtcgcatgatgggacctattaaaatagttttctcagtactccatgtggtcttacagcctagtccttgggttgctaaaggcctgaggattggcattcaaggccatcccccacatgatagagaaacaactcatgaattatcctctggctcccacatatagtctgtggtgtgtgtgttcataccaagtaagttttttaaatgtaaatttcttagtacttgggccaaggtgggaggatatcagattcaggaccgccc

SEQ ID NO: 35381 - DNA, 1120 bp, Mus musculus
tggcggaccgttggcgcggcgcgcgtcgggggtctagactgcggcctcccgcccgcggatgcctcagcgaatggcgaggctcaggccgcctccgccgttctgagagggccgccgcttccttttccagcagaaaggatgctagtgtcaggcgcacgcgcctgcgtacgggtgggcctgagtgggccccgccggccctgactggtgggctctatgatgtaatctgggaggggcgggggcggggccttgggttcactgctaaccgcgaggaactgactgggagctgagggcgcagctcatagtagctgcctgaaacgtggctggaccaagttgagaaggaacattgttgaatgcaaaactgattatatggggccgggcgtggtggcgcacgcctttaatcccagcactcgggaggcagaggcaggcggatttctgagttcgaggccagcctggtctacaaagtaaggtccaggacagccagggctctacagagaaaccctgtctcgaaaaacaaacaaacaaacaagaaaaaactgattatataattgggagtgtatttagtaacttaaataatttcatgtttcttttagtttttttcttttttcaacgtagttacttgaaaacttaaagatcacctttgttctgttttgggttttttgcacagtgcctcccaccatagcgcaggctggcctgaaattcactttgcatcacccacctccctcagagtgatggcaatccctcagcctcagcctcctgagtgttgagattacaaatttgagccgccatacacagctaaaattacctcctcctactctcctctccccgcccccctcctctagagtgtcactacggtcacattatattgcctgtgcatagtactggtccagaagaaatagtgatacccaactcctttatgcttattccatgatccacatatcttaatcatcacaagagccctacatggttaatatatcctcagtgccctttgtagttttagttatgagccttatctttaatagtttaattttctctccagcactcctcattctcattatgttaacaggcaagtttagtaacaccacagtgtcaacaagacaatgtttggctagtggggctttaactt

SEQ ID NO: 35382 - DNA, 1157 bp, Mus musculus
tacagggttagtttgttcatttttaatcaatattttattggataaggatttatttttgtatgtttagatatataaaatttattcatagttttaaaaataattattatttttattttatgtgcattgcctgaatgtatgtttgtgtgagagtgttggatccctgggaaatgttcctctcgcaaaatagagatcattgccttctgaaaccttataagttaaataggttggaccctctctaagcctgaaaaaggattctgccatgtctgtgataccctccttggctttaagcaggactgtttgggagaaaggggatcacatttttaggacagtgattctggtgactagaaaatggattatgaaattagagggctgattgagagattcagttctgttaagagacttgtacacccaattcagtggtgttcagctgtaattttaggttatgggaggtgaaggcagggggatcagcaattcaaggtcatcctcacagtgagcttgaggctaggctggactgcatgatgagaccctgtctcaaaaaagaattgagggtgctggtgcagagttcaggtgaaggaagggcatgcgaaccaagacagataggggtggataaagaagctaaacacagtagggggactggtggcccctgcctttaatcccagcacttgcaggcagatggatctcttgatctctctcagcctggtctacagagtgagtctaggacagctagagctacacagagaaaccctgtctggaaaaaccaaactaaaccaaaagaaacaaacaaaaaaacccctaagcactttacagatagtggtgatgttatttactgagcactgtatcctggagatatctcacctgtcagagtcaagttgtgcatctgttgctcaagtcagcagcagcagcagcagcaaagaatacagatatgggtttaacactggaagggaggaaataacattacaaaaatgggtaatttgaaagaaggaattacaaagataaaagtacagcaaagagccataacaactttggaagtaagattcaaataagtggagtaacaggcacacacacatacataacacaaacaaaagaaaacaattgatttaaaaactagagagccaaaagaatttagtgagggtaagcttatctctgtaggtgaagaa

SEQ ID NO: 35383 - DNA, 1146 bp, Mus musculus
tagttcatccagtagtgagctgtagccaattaataactcaaattaatttttgaaaatcattgggtttgaaactgatctgtctcttttgtggttgaaatttatttttattttattggatttattatataacccaaaataacccagatctctactctgcttttttcagaagcaatctgcaatccccagtaaggtgaaattctttttgtttcactaaacattttctctaaagtatctgcatcagaatcagccaacaaaatatctatgtaatgataaataatggattgaggaaattgcctatgaattatttctactggttgttgcataaaatagaattgtaccatttaacattccgggtggaaaaactttccactgacaccttttttgtacaggttgaacattattatacataggcactgtgaagccagtttttttctttatcttgctcttgcagggggatagtaaaaaagcagtcttttaaatcaattactataccttaggtaaaggaactccaggctgtgatggactactctactcagggctctcaaatctgttaacattctctatttcccccatttcttttttataacaaacggggaaattccatgggctggtagactcttctggatgttgagcctccaggtacattaattaagcattaattaagtttaaggctgttctgctcacacaggcttctttcacttagtcaatcgttttaagggtaggggccattggtctaatttcagcagttccccatcctaccccactttatacatttggaaacccagtcactgttgtgatctggttttggacaatctgcagtctgtgattttgtagctggctagaatgtacaccagaacatttctttcagaatcctgtagatttcctattggcaatatcttaccaataagagttgaccgtgggctggagagatggctcagtggttaagaacggttaagccactgcttttccagaggtcctgagttgaattcccagcaatcatatggtggcttacaaccatcttaaaggggtctgatgtccttttctggtgtgtctgaagacagctacagtgtactcatataaataaaataaatgtacccactgttacctccagtggagttgaacagtatggaccaaacctgacatcca

SEQ ID NO: 35384 - DNA, 1177 bp, Mus musculus
aagcagccaagccgaggctgctgcacaccagccccagacacagccccagccccagaccctcacccagagcccacatctttactgtgtcactcaggctggccaagactacaggcaggtgtcactatgcctcgttgtggagaaattgtctgactactcacaaagtgtgtgtaggattaaaggctgtttgagctccaaagtacttttttcagcaacattccaatagaattggtggatcacatatgaagtcctgtgtgtaaaatcctataccatgaaatgggaatttatattctgtttcattggtactttttgttcttcatttttttccaaagaaataagtaaaattacaacataaaagctagaaccattaggataagtactggggaacctttggtttttaggagtagatcacaaatcccaggccatatttgagatcatagaggaattctgatataagaactgaagtatgaagagtgctttttatttctgtcctcttggttacagaaggtatttcagcctccaaggtactgatcaaaagaaatagcttatactatatttgaggaacattacagagcattattttttttgatcttctgacctaaaacttttgaaacctgagggtagtgacttatacttgagatttcaagacttttgtaagaagagtcaagaattttgagaggtaggaagccagtctgagctaagtagtgaggttaaggctaccctgagctatgtgaaaccttgtctcaaaaacaaacactcccctcaccccccagtacttttacaaggtaaaatcagagtgacaaatcaaagggttaggaaagttcctgcagtgcctgcattcggagaagccctgacttccacctgaatgacatcacaaggctggtgtctttgctaagtgctccctctgaaggtctagacatcttccaagatgttcttttaattcccccccctttttttattgggggcagtggagttggtcagggaagtttaaaaaaaaaataatgtcaccatttgcttttttaaatcatgtttggtgtgtttctgttggtttttgttttttggtttgtttgtttgtttgtttttaaaatgagactccgtagtttttctgagagataggtagagatgctaggcaataaacgctcaaagttcatgatcaacattgatttattccacatttatt

SEQ ID NO: 35385 - DNA, 1134 bp, Mus musculus
actttgattccctagtctagcctagttctggttcttgtagttttctactatttttggaaaggtagtgtgaagagatgcttcagaggatctccctgggttccagagagtcttcctggctttcattatgtaatgactttctttataattaatcagacccagttgtttcagcccatagtttctgcctactggttcaatggcataaacagtcccagttgaccaaattggaaatcacgtgcatcttctaatttaattgcatcattgattgtgtaggctagtagatgttacttcctttttggagactaaaacatccaaattagtagaactcagttggcaaggtggaatattaggttctagattgatgagtggcaagggcttaggatatggctcagcggtagagtgtgtgcttagcacgtgtgaggccctgggttttcaagcctttgcataaacaaataagagaatgaacccacctccctttctccttgattctaaatctgtgtattctggcagtagtcgagacaagcaccatgcgtggtttctgattcaatgcatcgatacttctttcagagtgttgtctaactgaacagtaagcagttctgtttctaaattaggggtgcatctcacagacatgagctccactctgcaattctttgttgttaaaatgcccaaccccgacttgtttagaaacaggtgtgtgagatgtcaagattttgattcaggggctggtgagatggctcagcggctaagagtactgactgctcttctgaaggtccgacattcaaatcccagcagccacttggtggctcacaaccatccataatgagatctgatgccctcttctggtgtgtctaaagaaagctacagtgtacttatatataataataaataagtctttgggctggagcgagtagaggtcctgagttcaattcccagcaaccacatgatggcccacaactatctgtgtacagtcatatacataaataaataaataaatctttaaaaaaagattttgattcaggcattctcctgtaaagactatctcctactttggaaaacatccagtttgagactagtttcctactttgggaatgttgttataatgttttttccttccttaatcagttggccatgtggaac

SEQ ID NO: 35386 - DNA, 1099 bp, Mus musculus
cccaagaatatacaaaccatcacatatactaaataagtaaatctccaaaaagccaacaattaaccctaagcagaaaatgataccccagaagagggcatctaacctaattacagatggttgtgagccaccatgtggttgctgggatttgaagtcaggatcttcggaatagcagtcagcgctcttaaccactgagccatctctccaggctgtttattttgtttgttttaagacatggtttcactctgtgtatgacagctctggctctcatacaactagctctgtagctctgtaactctgtgctggcctccagctcacagagatgtgccttcctttcctcccaagtactgggattaaagatggagctaccaccacttagcaaatgtctgtttttattggtctttgggtttgtgtcttcttggcaacacatttctgatttaaactgtcaaatgtcttttcccctgactattgatgaccacatttaaaaactgtgtttcaatattaggtatgcttccctgtgactcatttgcttccacggctgttgtatctcaggagtggtctgtgggagccccaaactctccatgttcagagtcctgtgtctccccagaggttactatagaaaccctacagccagcaacaggtaagttattgaaaactatttcattagttattgcttatggcatcagtaatcagtgttctaagcagcttatagcagatatagataaacagtctttttatctttcttagagaaacagaatcttacctggaatggaacttactgtgtggattaggctggcttcaaacttgtttgcttctgtctcttgagtgctgtgatgaaagacatgcttgatgcagatttttaaacactggagtgttttgtctcataaagtaaccgatgctggcctatggtgctcttcctgcctaatcctactgaatgccagacttctgtattagtcagggattattagagtcacagaacttacgatagtctctatatagtaaaagaatttattgatgacttacagtcggcagcccaattcccaacaatggttcagtctcagctatgaatggaagtccaaggatctagcagttactcagtctc

SEQ ID NO: 35387 - DNA, 1100 bp, Mus musculus
atggtttcactctcagaaatagaagaggctctggcaaagaatgatgagtcctctgcagaaatacctgtggctcaggagacagtggtctcagaaacagaggtggtcctggcaacagaagtggtactgccctcagatcccataacaacattgacaaaggatgtgacactccccttagaagcagagagaccgttggtgacggacatgactccatctctggaaacagaaatgaccctaggcaaagagacagctccacccacagaaacaaatttgggcatggccaaagacatgtctccactcccagaatcagaagtgactctgggcaaggacgtggttatacttccagaaacaaaggtggctgagtttaacaatgtgactccactttcagaagaagaggtaacctcagtcaaggacatgtctccgtctgcagaaacagaggctcccctggctaagaatgctgatctgcactcaggaacagagctgattgtggacaacagcatggctccagcctccgatcttgcactgcccttggaaacaaaagtagcaacagttccaattaaagacaaaggaactgtacagactgaagaaaaaccacgtgaagactcccagttagcatctatgcagcacaagggacagtcaacagtacctccttgcacggcttcaccaggtacaggcttctgctttcttttagtattctctctactggggtgtagactaaaggacagctgtcattcctgataaaatacagcctcgctgcttttcaagtccaattatgtttctcctagtcagcgtgctgaccctctccttcctctctggtggctcgtcccattttttgttcattcttgcttcttttgcagagagtgaaccagtaagacccacagcccatcattacccatctacatactgactgtgtctgtatgcactgccttattcctttttttatggttaacatggcttctcagtaaagccaacctcgcctcactttgcagcaagtcccttccctgtactcaagtgtactgcttcccagccggccttctccctttactcactagtgaagtcttctttccatttaatcgttcccacctgctttcagaaacgtttgg

SEQ ID NO: 35388 - DNA, 1123 bp, Mus musculus
gtcctagcaacaagcatgatcagtgggtcatcatggacattttgtaatggtcagatgagtgttgaatctctgcagatctcttgttaaatatactcatttgtttgtgcaggcatcaagactgaggggaaacctgctgatgtcaaaaggatgactgctaagtctgcctcaggtaatgcctaagtcacctgttgggaagtctaatgaccatgctgtccttccccagttctaaggctcccctgctctccctatgaactcctgtacttctcatttctttgcagctgacttgagtcgctcaaagaccacctctgccagttctgtgaagagaaacaccactcccactggggcagcacccccagcagggatgacttccactcgagtcaagcccatgtctgcacctagccgctcttctggggctctttctgtggacaagaagcccacttccactaagcctagctcctctgctcccagggtgagccgcctggccacaactgtttctgcccctgacctgaagagtgttcgctccaaggtcggctctacagaaaacatcaaacaccagcctggaggaggccgggtgagtcagtgagcttggggatctttgcattctggcttctgttgcttttctgccacatgcagtcatctagatcatttcattcagcatcagagaatttcagtcttggttcttggcactacaatatcagggaaggcctggccttatcttcccataaggacctcctgttcactgtgttgggatttatatttatatttttctttgggaggtagaaagagtcttctattttataaaaactcttagccgggcagtggtggctcatgtctttaatcccagcacttgggaggcaggaggatttctgagttcgaggccagcctggactacagagtgagtttcaggacagacaggactgcacagagaaaccctgtctcgaaaaacaaaacaaaaaaactctagaaagttggatgtgtggttcctcagagcacttggaagacagagcagcagaatcatgatgagtttggcgccatggcttcagggtttagggagtttggagagaaagcttcagaaactgtgaaggtaagagacactgcacatgagccccatttatttttggtt

SEQ ID NO: 35389 - DNA, 2547 bp, Mus musculus
atctcccctgtgttccctctcttgtctcccccccttgttaccctctcccatccctcctcacgtgtcactgcagattgagacctacaggctgacgttccgggcaaatgccagggcccgcaccgaccatggggctgacattgtctcccggcctccccacttccctggtggcccaagcttggggtctcgagccctgggctccttttcccgggctgtctactagacttgtaagctcttgggtgctgggcagcccctttaggcctccctccctcctgcctcgcttgctcaaggcagcagcagccccactcgctgccattacacctccttccacccctttctgggccaactccaacttcactatctcaccacttcaccactgcaccacggagaaagttgggcggggacgggagtccagtgggatctctgtgggatctaggggtgaggagctggattccagccttggctgtttggtttttttggaccaaacccaaaagaaactgacaaacctctcttccctggctcaacctggagggactggtaaaggtgaactccacgtggagaccagcaccgactgaatccctggaacctaaaccactccttgaccccacggggtggaagccaccatttggtggtaccaggcccttttgctgcctcacctcaagttagtcaaggatcagtcctccttgtccccacgacttatcgtacctgagtagctgctgtctcacttttttattctttcctctcccaataacctatgaactggtggtgtagtttgcaggctgaagccatgtctaaatgagagttcttggtaggtggtgagggaagtggggaaggagatcccgagtctccactgaggaggctgtcagatattggcgggggttgccctactctgggcagcttgggccctgcaggaagaagtgaagtcagacagctagggtgggtcagtgtggctgattgtgttggtattgtgtgtatgctgcttttctaaccaagaggctggttttggcatctatctcattccctgggaatgcggtggttaaatgtgtgatacaaaatcagggctggagaaacagaaatgaaggtcaaaatcgctggcctgtacctacaggccatagcacccaaatcctcatatctaggggagcctgaaatgtccagaacgcttgtgaacagtggggaatcaggtgtgaaaatttaaaactaaaatgcatgagactgaggccatccagtcttctggtgtggcgggagaggtggagccatggtggtgcagccatcccagcgtggtctgctcatggatgggatggttgcaatgttgagaaaatcccgggaattttatcaacacaagattcttattgcacttgtattttttgtattaaagtttgcatggtttctaataaaggattcaaacctaagtttgtattgaaatggcctgggagtgtctaagggctcctctgatagggcattttctgctgggcagatttgcctctcaggaggctggcccagacttggtccccttggccctcctccgaacagactctgcctttgcttgggtacagtttgaggaggtagaggtctttactctctctctgccaagggaaggtatccctgggcttgaaggtcttctccatttatgaggtagcagttactttgtgataatcttgacactgaatccctagctctctaagcacacacaaagaattgctgggacctgtggaaaaaagactgcctgagctggggagtggctttcttcccaagctgtcagaactaagcttggagcctgcattgtctgtattttgcagcaataggggcccacggagctgggaaggacacagtggggaccagggtagtgatgactgagcgtatacaggtacttgctaccctccttgatgttgatcttagggccttgaagatgctaaggaaattgacaagaaacaagtccattggccaaggattagagaaaggaaggtaacccaagctctgtaggtagctccctggaaggatcccacgagccagagaacctgagaaggctggtctagcagcttgggaccacaggccatgtgatgtgcatacttcaaaatgtttgggaataaggtccttctgtattttatagtttgctcatggcttagccattacccatgtctgtaattgttgtactgatttaaacaataaagctgcctgacatcccaccatgttatgttgcttctgtcctcttagtccttattagttcttatccccttcagctcctctcccacctgccttatggctgtggccagggcaaaatcaatgcctggagttcctggcaggatgtacacaaatcaaggctgcctagaacagtgctctttgcctcttgctattcatacccattaggacacggtctgtgctgtgggtatcattagaagcatctgtgacaatgctgggcttgaccagatagttagctggaatgtgttggctgctctggtggatcactcttgaggatagaggttttaagccccatctgcctgtaggacttgggccactgcccagagtcctgagaggagcccttgggaggacagc

SEQ ID NO: 35390 - DNA, 1113 bp, Mus musculus
cattgtggatgaggtccatgagcgggatgtgaacacagacttcctgctgattctgctcaagggcctgcagcggctcaacccagctcttcggctggtgctcatgagtgctacaggagataatgagcgcttttcccgatactttgggggctgccctgttatcaaggtacctggcttcatgtatcccgtcaaggaacactacctggaggacatcttggccaagctgggtaaacatcagtacccacaccggcatcggcaccatgaggtgagggacaccactccagggtctggagctttcctttggattccctcctccctatcctcatgataggccattattttcttcccaagcctgtctccttggtaaaaagtagggaataacatgcctttgtgtgtgacaagtgtgggctagggtttacatacttagcttaccctcactgtgttcctgtgtgtgactcctaccccatgactgtgagtggcctttcttcccctactccagtcggaagatgaatgtgcacttgatttggaccttgtgactgacctggttctgcatatcgatgcccgtggggaaccaggtgggtgcttcctcccacttctcagctactcccttaccccactagctggacaaccagctcatggctgcagggtccctttacaggtgggatcctgtgctttctacctggctggcaagaaatcaaaggagtgcaacaacggctccaggaggccctgggcatgcatgaaagcaagtacctcatcttaccaggtgagcgtctgggtatgcacgctgcagtgttgagtgttgctccctgtggtagggagtgacccggcctatactccagtgggcctggtttctttgaccatttgggcttcagttggatcagggtcagggttgggtgagtgagtgatccagatccttgccctgccttcagtgtgggactcttctggctaaacagtgcgtgaagcccttttgcatcttgctatccaccagtgcactccaatatccccatgatggaccagaaggccatattccaacagcctccacttggggtacgcaagattgtattggccaccaacattgctgaaacctccatcacagttaacgacattgtacatgtc

SEQ ID NO: 35391 - DNA, 1194 bp, Mus musculus
atggttgtgagccttcatgtggttgttggggattgaatttttaggacccctgcttgctctggtcaaccccactctcactcaggcccgcttgcttagtccctgcttgctccggcccaaagctttatttattattatgcataagtgcactgtatctgacttcagactcaccagaagagggcgtcagatctcattaagagtggttgtgagccaccatgtggttgctgggatttgaaccttgggaagaacagtcagtgctcttaccccttgagccagcccccttcctactctttctatctgttacggtttgtgagatggtttcactgtgtaggcaaagctggcctggatcacaagattcttctctttcagcttccattgctgagataacaggggtacgccatcatgcctggattcaagtggatttttattcccatttctggccaagactgaagaacgtatagcagggcccagcacaagctgactgaggtgtagtgatgctatgatcctaacagttttctctacccaacagggctggggtctgctgggaccacggaatgagctgtttgatgcagctaaataccgagtgctagctgatcgttttgggtctccagctgacagctggtggcgcccagaacccaccatgcctccaacttcctggcggcagctgaatcctgagaacattcggccagggggtcctgcaggactatcccgatccttaggccgagaggaagaggaagatgaggaggaagagctagaagaggggaccattgatgtgacagagtttctgtctatgacccagcaagactcccacaacccactcagggactcaaggtactgctgttacaggggaccctggacacatcttgacataggattgaccttctctgagcctcttttagtcgtcatatcttgttgctcactgtgtctccccacgtgagggatgggatgagatagtacactactgtcttgggctgtggctgggctcctgcagactgggcatgaaccttctttccagttcacacagtgatcgctttgcttactctctccctctgcctgcttccctctggggaagctgggggagtgtgggctctgctgtgtgactgaaggggcagtagagcctggccccatcatttcatgcctcctacctacctgttacatcagcactatgtcccaaccttgaaggcccagagaacttgc

SEQ ID NO: 35392 - DNA, 1128 bp, Mus musculus
cgagtgctgggattaaaggcgtgcgctaccaccaccgggcacttgttgctattgttgaggtcctggattcagtcctctgcagccacacagttgctcacaaccatctgcagctctagttctagttcatttgaagtttttatcttacttctgtaggcatcaggaccatgtagggaaagacaaatacaggcagaacattcacatacataaagtaaatcttttttaaagaatcgtggtgctagaaagattactcaaagacaaagattactcaaagtttgattgctagccctcagaacaattcactaccttctgtttctttagttcttggggatccaacgccctcttctgtctctttgggcaccaggccatcaggtcgtatacaaccatacacactggcaaaaccctgctaaacataaaatttattactccacttcacagatgatatgcaccgaatgacttgctatgtcatctgagtagtagaccgtagagctgagagtcgaatgccatagtgacaggctcccctgtccacttctgcacattggctcacacttactggctgtggatattcctttcccacactctgacagccattcagaaatgagaacccagtgagtctgaaattcttacttaggcggcacataactgcttcaggtagttctaaagtgctttttaaaagatttatttatttatttatatgtgagtacgctgtagctattctcagaaaccccagaagagggcatcagatctcataacagatggttgtgagccaccatgtggttgctggggtttgaactcaggacctctggaagagcagtcagtgttcttaaccactgagccatctctccagcccctctaaagtttttatattttagttttctacagataaagtgacagtacttttatttgtttggagtaatgagtaaatactcattttttaaggagaaatgtagagggtgccttgagtttctacttgaatacttgactttttcttgtttgtgtggcatcaagaatgagcatttgttagtctaaatggttttgaggggtttctagttttgttttaaagatgtatttagtagtctttaacctagccatatgatacctttaattttcatagcggtgctccagcattga

SEQ ID NO: 35393 - DNA, 1110 bp, Mus musculus
tctgttatctttaaaacttgtgtctcgtttacagagggctgggtttgaaaggcatgtgccaccacaactagatcactacccaacatttttttagaaatactattggcagaatcttggcaagtctggctttgccttttatagagcagtagagcctgtaagccaggattagtagaagtttaagaccagtctgtatcacgtagtgagaccctgccacacagaagcaaaataaagagcactggcttcgtttttcttcttttctgtattacttccttgttatttgatattaccgatctatttctgtcttcacttaggctctggagatgtacaaggacgattggaataaagtgtcagaacatgttggaagccgtactcaggacgaatgcatcctccactttctgaggcttcccattgaggacccttaccttgaaaattcagatgcttctcttgggccactggcttaccagcctgtccctttcagccagtcgggaaacccggtgatgagcactgttgcctttttagcatctgtcgttgacccccgtgtagcatctgctgcagcaaaagcagcgttgggtatgtacttcttgtggaagctccctctccagcactgaagtctggcctcacattcaactattaccaggtctgcctcaggtgtatcaactctgctacggaagcagggggatctgagtttggatgggatgggtgtttggatagcatttctcctgggaggtagaactagacggcctcacctgtcaccctgtcagagacggtaactcggacatgaagggagaactggtagaatcgtttgatgtcagccactagtctgtagatgcctactggattgagcccgcagacttacagccagacacaagctcactcccacacatacatacaaatgtttttaagaatacagctgtgttaattcacatttctcttttataaatcataaaaacaagccacaaggataatgtgcttcataaaaattaatgtgtgaaaatacagttgtaagaacatttgtttttctttcaccttttaaagtctatttctgtgtgcatgctcaccatgatatgtctcgaaaggccagaggattagcagtgggacggtgagctctct

SEQ ID NO: 35394 - DNA, 2899 bp, Mus musculus
agcataatggctgaggcaggcagatctctgaattcaaggctagtctggtctgcatagcaaattctagaccagactaggctacatggcaaaatcttgtcccaaaaaagggaaaaaaaatcctttctgttacttcccattaagtggactttcccaaccgtccccgtgtttccagcaatgacgagttaccttgaatgtgtttgcagatcctcctccaccacagcagcagcagccgcctcctcctgcagatggggtccctccacctcctgctccaggcccacccgcctcggccactccctagcctggaagatacaagagcctccacagccaccacaagcaggaatggggatggcaggacttgtgtctcggcttccttggttttcttgcaggatttttttttcacaaccccaagcacaagccccatgtctctccactccttgatacttcttgtgtcaggtccttagttgacactcattgggaagcctgtggtgactgatgtgctctggtcatttaaaaagtaccatgtgtctcccctgtccccgtgtgacagatgttggcaggtggtctgcaggtcctgttgtgttgacattagtattctttgtgtgtatctctctctgtctctctctctctgctttgtctaaggcttcaatgtataatcctctataattattgtcctttcttcctttgtaatggttgtttttttaaggaaagtatcctaagttaatagaaaccaaaaaaaatggtaatgggcagaaagagatagccacagagggacacaccttaaggcattataagtgaccttatttctgcttatctgagctagagtggtgctactgatagagtccctgagacttgtcacacataagtgcaccaagatgagaagagctggggaaagggggtatcctttcgatttgatttcctggtgaggaccatgaaggacttccctgtgcctggaagaacatgccactgtacctagtacacgatagatagcaaagagcacagctttacaacaagcccttcctaccttctcccgccattctggttgtctgtgcagaagatttgcaggattggaacatggtggttgttttcccaagggcagcgtgagctttcagagttggggttttcccagtctaacaaagataaagggtctggggccctacctacaaacctttaggaacccttccaaacctcccaaccttccccaaacacatagggcctaccctcgccaccccaataaacattacatgttttttaaaccttcctataagaaaggaaaaaaatgtaaaatgggttatagattatgttgaacattttatctcatgcggcttggtgggggtgggggtacagatccctaaactacctcttgctgtagccagggtgagcggggttcttaagcggtactgaggtgcagaacgggagtgggaatgctcacatgtgatgagcagcctcctgtacctcacattctgagacctcacattccatctgttgtcacagggttatggagactgtgctaatggcacaaggacctcacttggctccagagtgcgaggctgtaaggtttaagtgccatcccagaggaattgccaccaaaaaaaaaaaaaaaagccttaatctgagcctgtatctacccctgctgatgaacaactagatgggttttggttttgccagcttctttcctccctccctccctccctccctccctccctccctcctttctgtctttccattagtagcaaaagggtgtttttagcagaactttaagtggcagtttcattcttgagagtgcaaggtagagcaccttacgggtgtatttttatgtgtattttaaagctttatgtatgagagctataggtaggcatttcttaataacacaaaaacctacagttgagatttgcctttaagactcttggttttcctctaaccaggagcccacgtcaccgccagagtcctggagctagagctaatgactccagagccttggggtggaaatggagattcgcttattccctgggtgcttgtttttcctccaggaaaaccccggtgtcttctgaccgcagccagggttgccctccttccctccattctctcccaaagtaaattgactccagcacttgccttctccccggagtcctaggggaggtataggactctgcttgtctgtaacctgaggtctgtaatgtgattgctttccagttttgagagatgcaagtgggaatagtttttacattgttgataatctatagaacctaagttcaacacttcaacacagctctttccatgactgtcagttaggtatcattcctgtaataacacccatccagttttgtgaggggcgggcttggatactgtgtggtttttgtacaaatgtgtttctcagtgtgggtttttgttttttgttgggttttttttttttttttggtgtttttttgtttgtttatttgttttttttctttaggttttgttctaatgaggtaaaggagctttgagagtttgggagaaaatgaatgaaagtggcttaatgtccctcgtttgcattgaataaatgaaataccatttatgaattctagtcccattctctgcattcatccattcatttctagtgtgtcctgtaaagaaagagtactcagtctcacctgggcctggttagatcttaaaatgccgttgctcggggcctttacacgtgctttagtgtgaatggatgccttccccttcatcaaaggaagatgaggaggacatcctgcctcctcccaggggaacagccctagtgagccagagttagtcaggtaccgcttagatggaacccggtctcatcagccgataagaggtgcttgcaaccaagcctgatgacataagttcagtcccgtggctacacacatagtgggagagaactgactcccaagaa

SEQ ID NO: 35395 - DNA, 1109 bp, Mus musculus
cacagggccacttcagtcagggcagctggtggtggtggtgggggcctgagaaggagcgttactgctctgaggacgccacatgcactcggtcctgcagatagtgcggcgtttattgattctaagatacacattccttctcacatattagcatctctgaaattggattgtgtcttacaattgctggcatcgtgaaatcactgttggccagatggttgtcttgatgcagttgtaattgcctggcatgcacaaacacggtcatagttgttcatatcgttggcagttctttaaagtcccactgtgccgcttccagttaagagtcccaggggatgagagagcgttggccgggtttaagtggctgaagtttactcccaagggcaagtccaggcctggtgcatcttactctcctcatggtgtgatttagtatctgatcccgacattgaagcatcactgctggggtttggcaatgataacttgacttacattttcccttccctcttccgtccttctagtaaattccggaccccatctgagctccacaacgacaacttctccctctccaccattgccgagggctctcatccaaatgtaaggaaattttgcgacactccccgtgtctcctccccccatgcccgtgccttggctcactatgataacattgtctgtcaggtaacttatcttcctcacatctccccttttgcatgcctctgcccctgcctcccactcccaccctgtccccttgccctgtctcagagtaggcagtcaccaaacagctttgaagatcagctcagggcaacccagtggtgcagggaacggtgcattgattccctgacagtctgacttacaggtcctagagtctgctagaatggctcatgatttgaagcttcacctgtgctggagaatttcctggtggtttctgccccttgggataggcagagaatcctgccccttggtactttctggggctcctaacagctagcagacttacaagtgcccccttggagccaagacgagcacagaaactgttagaaccgttagtctaggaacaattctgatctgagtggggggtgggggatcttggtttgtttgttttttctaagacagatgctcac

SEQ ID NO: 35396 - DNA, 1170 bp, Mus musculus
tgccaacccaaagacagatggcctgtctgctgtggcttcggtgaccttgcgcttaacaggatcagctctgggggagacagttggactgaaggaaccctgccttgggttagacgctccctcccatttcctttccagggggtctatagcttgtttgcggtctctgataggattcctctgctccacactttcaggacctgcttctctaactcccggcctacacggcaggtttctctgtagcttagactggctctgaatttactatcttcttgccctagccctccaggtagctgggatcacaggcctgagtcaccagtactggctggcagtccctgagccctggaggtggcttgcccacctttgtgttgttagagctctaaaagtcactctctcctctatgtaccctgaagagcatgtattgaagacgagaggctctctcaaggaacctgaaacctggttcctgtaagaggggaggtgactacaggcctactgtgctttcctggccctactatgtgttcctcggcttttcagaccatctttccttttttggaggggtgggaatcaggggaagggtctcttgcattctgggaaagcctgagctgtatctcttgtccccatcttgaacgtagaaagtgtaaattaagaatgagccattatgtgatagcacatccctgtaatgccagtacttgaaagggccgaggcagaagatcatgaggtctgcctgagctacatagcaagttcaaagctagcctggccagcacagcaagacctgtctcaaaaactaaaaaataagcaggcaaaaaaaaaaaaaaaaaaaaaaaaaaaaggtaagggttgtttttaggaagtatagcatggtgcaattctgaaatttgaaacaaatttgtaaaaacaagaatattaggatctcatgttcactcctggccacctaagctcaagaccagtttagcctacatgtttccctgcctcaaacacaaacacacctgcagccatgctcacctgcagccatgctcacctgcagccatgctcacctgcatccacacctgcaattgtagctccaaggaaggcagagacaggaggatggctgggactcgccgccttctaccttagctaagaaaacaggagccctgggtctggcccctgcccccccccaaaaaaaaataggtggagagt

SEQ ID NO: 35397 - DNA, 1185 bp, Mus musculus
aatccgtctgcctctgcctcctgagtgctgggattaaaggtgtgcgccaccacgcctggcgtatgtaggtcattaataaacagctgttcaagtgtcgaaatgtccataactgactagctttctctgatggggctcagccctaacttaccttgtactcttctctactttcaggggacgctgactctcctctgtgacgctaagacagatggcagcttccttgtgcaccacttcctttccttctacctgaaaggtatgtgactccctggtgctgtagagaaggatccccaggtctgcagagatggctctgtggtttggagcaccaggtactctctcagaggactcaggtttaattcccagcacccacgtggtggctcacaaccatctgtaacttcaaaataaaacaaaaatcagtaattatctagccaggcatttggtggcgcacgcctttagtcccagcacttgggaggcagaggcaggtggatctctgagtttgaggtcatcctggtctacagagtgagttccaggacagccagggctacacaaactaaaacaaacaaacaaacaaaaaacaacaataaaaaaaaagtggaaactcagaacagctaagaaagtagagaagaaaaaccctaaggaagcaacggggaaaacattgattgtcttggctttggtgtttgggtaatcaatgagctttcctgttaggtaccgagtgatgggggcatcattacaccctgcccaagaatgccgtgtgcccatctgatctacagcctgacttcccttcttctccgcctccccctctccatccactgtggaggagccaccacctctctgaggtcctcgtgggggtggcttcctgacccagttgtttcttagctgttatgtgtttagtcccagtttctccaacccgtgtgatattttgccattgcaatagctgcttcctagagaacactgcggtttaccttaggaaagagattagaaagtctctccctccattttttggtggtgctattactgtgagactgagtctcctggagcccatgctcgtctcgagttttctgtgtagctgaggatgaccctgaattgcaggtgtgtgccaccgtgcctggccttattcagtgctggggatccaactcagtgctttatgagtactcggtaagtactttatcagcttagctattttcccagcac

SEQ ID NO: 35398 - DNA, 1141 bp, Mus musculus
agaccgaacttccagcaagttctggcccttaactaggcctaggatgcaagccaccccttccctacgttagggcagaattccccttctttctgtggtaactggcagacaagcacacgagcaagtcaggacttgtggagaaaggctctgtcctgctgtcctgaccacactagtcagctcccagcctccagacagtagcagaagggtgttttcctttgccattgctgtgctctgccaagtctggggcctgtgcctcccaggctgagagccactcgcgcagacaccatgcctcttgtgtgttcactgcaggagttctgcctctttgctgttgtgggcctggtgtctgacttcttcctccagatgctgttcttcaccactgtcctgtcgatcgacattcgccggatggaggtaagagaggctgagtctgtctgcttggtgctgactttgtttagaaggtctctgagtgagtgagcatggcctcaagcagaggcagcctccgagcaacttggggcctgatctctgtgcactcaacagctagcagacctaaacaagcggctgccccctgaatcctgcctgccctcagccaagcccgtggggaggccagcacgatatgagagacagcaggctgtacggccatccacgccacacaccatcacattgcaaccatcttccttccgaaacctgcggcttcccaaaaggctgcgtgtcatctacttcctggcccgcactcgcctggcccagcgcctcatcatggtacctgtcagccctgctctgccttgcaaggggcagcactcaaaccccaggggtggcactgcagggccttcctgagctctctgaccaggagctcctggcctgcctgttggggaagcagtgccaggatcagcagggaatgagctgcctctagagggaccaggacagggattctccaggataaagtcactttgcgtggtcagggttttcctgggccctggctaatcggcctccgtgtagcagcagagagcagtgggatgtgctggctgttgaggtggcagctaacggagagggtgggggtgaactgaggcccttgggaaggtttgcagtagcttaggtacctgggccctctggccaagctgaccagggaatagtaccagctttctgggcccag

SEQ ID NO: 35399 - DNA, 1159 bp, Mus musculus
ttggttcctggaacagtaatgggatggggacacttttgttgataaaggcacattacactgtgaccaagttcctttgggcctcttttcccagaccatggtactggccagtggaggacaagatggagccatctgcctgtgggatgtactaacaggcagccgggtcagccaaacatttgctcaccgtggagatgttacctccctcacctgtaccgcttcctgtgtcattagtagtggcctggatgacttcatcagtatctgggaccgcagcacaggcatcaagctgtactccattcagcaggtgaggaggcgggttataggtgttggtgtttgggggattgaacacccccaacattgaagacctcttctgcctttgcctgcaggacctgggctgtggtgcaagcttgggtgtcatctcagataaccttctggtgaccggcggccagggctgtgtctccttttgggacctaaactatggggacctgttacagacagtctacttgggcaagaacagtgaagcccagcctgcccggcagattttggtgttggacaatgctgccattgtctgcaactttggcagtgagctcagcctagtgtatgtgccctctgtgctggagaaactggactgaaggcaggtcaagtacgctattccctttcccccatcccaaggtggggcacaggggatagcaactctttggacctagactagaggcaatagctgactctgaactgttgtctcctgactgtaataataaacttttttaaaaaaccacatttaccaggggctgaagttcttgtcattccacactcctcctagacccttctcagagctgtccaagaaatgtgggctaggaacagcaaagggggaggggtctttggcacctctgaggcagcagtaggtgaactcaagacaatggccacagaataagtttattatttcagcagcccagggctggaaaaatgtcaggttcctcaagggagcagagcctgatctgaggcctgcagtgcatctccatctggcagagctgaaggcagcagggatgggaggtgtagtgtaaggatcagataggcaaagccttttcaggtcttgttgagtgtccagagtggatccaggaggctgagggggtcatccgtaggctgggcagcccttagaccctgcccg

SEQ ID NO: 35400 - DNA, 1148 bp, Mus musculus
tgtttctgtggatcacttcctgtgtttgtggggtttagcaggtgctaggaaacaagctctaatctaagtgggcgtttcagtgtcttgggggcagaaggcagagtggtgcctgatctgcctacctcaatgttacccttacctcagtgctgtcaggggtgttcacggatgtggaggcctccctgaaggacatcagggatctactggaggaagatgagctgcaagagcagaaattgcaggagaccctgggccaggccggggctggccctggcccctctgttgccaaggctgagcttgcagaggtgaggcgagaatgggccaagtacatggaagtgcatgaaaaggcttccttcaccaacagtgagctgcatcgtgctatgaacctgcatgttggtaacttgcgcctgctcagtggaccactggaccaggtgcgggctgccctacccacaccagccctcaccccaggtaagccccgcccgttgctatggggaaaggcttggaactagggtctctttgatctcactgactgctgccgccctcagaggacaaagccgtgctgcaaaacctaaagcgcatcctcgccaaggtgcaggagatgcgggaccagcgtgtgtccttggaacagcagctccgagagctgatccagaaggatgacatcactgcctctctggtcaccactgaccactcagagatgaaggtgggttgggtgagcagcgagacagggctctgtttctgggcttctccttaggtggtggtgtccccatcttccctcagaaactgtttgaggagcagctgaagaagtatgaccagctgaaggtctacctggagcagaacctggccgcccaggacaatgtcctccgtgccctgactgaggccaacgtgcagtatgcagccgtgcggcgggtgcttagtgagctggaccaaaagtcagtacctgcctttgttcttaccgcagctccatccagagctctgtccctatagcttgcctcaatctggctttttgttttgcctaccaaggtggaactccacactacagaccctggtagcatcctatgaggcctatgaggacctgatgaagaagtcccaagaaggcaaggacttttatgcagacttggaaagcaaggtagctacccttctggaacgggcacaat

SEQ ID NO: 35401 - DNA, 1142 bp, Mus musculus
cgctattttccatccatttgccaaccctgggtgtccgtccaccttctctccagcaagatgggcctttacattcaagctacgaacgctggcgtcatggtataaaggcttacaaagaaatgtcttttgctgctgcaaggaagagattttctatttcttcccctgatcttggcaaatgacctcgtgaagagactcaatgctcctcctccctctggatgggaccttaccatagcacagaaggacccagagggagactgtctcttaccagtgcactgggcagtggggcagaccttcaactgccgctgccaaaatctgctttcctaaaatccttccagtagcgacgagaaggatataattgtttctagccccaaactgggtcttagggtccggtctgttccactgtccacctgattggtttcttgccctctgctgcctgcctggatcggcctagaagacggttcaggcggctctgggtgaagcctgcgggggcaggggggtggtccctttccccagaccatcaggtttcccagtgtgtgcaattgccatagattcagaaggaaggactcttgttccctgcaatgtaaagagccgggcctctgctctaagcacttgaaaataatgtttttatcttaaaagactgaacaatctggtaactgatacatcttaactaggctcccagtggagcgccagcatttcttcctgcccctcagtttgcctgctgaggtagactctaggggactatgggtcttggtttcctcttagtcctattaggaggggtgtatccacgctcctcttattaagtccttctgtgaatgtactgcccagcctcgactgtgaaggtgctgagaaccagtccgtgggctcccaggtgggcctcctgggtcctcacgatgcaagcagactgcatccctagagatgatacgccatctccccaccccccccgccaccccaccccggcctgctgctgccaggttaaccttcctgcctccactcccacctcctagtgtagacagtgtttccaagaaccatcaagtcagtgttttgatctaggctctgagcacacaagcgaacagaaacatttttatactcccctgtctgagggcgatggctgatctgtctcagtgtcagaactgtaggatcatgtg

SEQ ID NO: 35402 - DNA, 1223 bp, Mus musculus
attggcccagaactatgtagcccttgcagtatttgaacttgaatctttttgcctcagtgggctgtatagcttagataactggcgtcattcatcataatatgtcattacttcattctaacttccataaatacctgttagtggatcaactgaattgctatttagatctacatttggggataggatttttgtatgtttctcttaaggagcgcataaaagatgtagctgtgcttgagttgccacagagcaacatacttaaaatatacatccttgtcacgctcttcctagcttttcccttctatgtagatagtcttcagtatgccttggtacacgcatgtacaccagacttggtgttttagtcttcctagaaataaatgcatctatacttgtgtaaaaatgtgattcttcaacatgcccactgccccttatcccatttaattgctgccttctttctatctcatactttatacttaggcagtagtgaatgaattttcttgtagaacttgttctgttttcaatttctgccttttatttgggatcactccaaaagtatattcattaaaattaatcctctggattctttacatccctggtcttttaaacaaaattgtctcctactttgctgctacattgtatatttctcagtctttatatttacttcttatgttggaattacttttgtaacaatcattttttgttacttattagaaaaagtaaggcctcaagctcagaactactgctttactcatttggtttctgttacttctcctagtggtttgcaccagcttcaggaaacagttattacaaaaaatagagcatgaaagagtggatgggttttataaggatctgttttaattcaaagttacattttgtttgaagtatttatgattctgttttattcttttgcatgttttcttggctgaatgggagtagagaagaagaaaatgaggtaagtataattgaattagtcatttaagaaatggccttttaagttcatttattacagctgaaactatttaaagttaactatcattttggttgtgaaatgaagttaatagtttaatcaatttggttattgtgagctataataactcatctcaagaaagtcttttttttttattttatgtacattggtgttttacctgcatgtatgtatgtatgagggtgttggaagccctggaactggagttacagacagttgtgagctgccatgtgggtgctaaggt

SEQ ID NO: 35403 - DNA, 1116 bp, Mus musculus
aatacatgtgatgaatataagcagagcattggtagcactagttcagcttctcataaccattttgatggtttgtatgagcctatagggagttcaggtatttcatctctccagagtcctccgtcaggaataagatgtgaagaaaacacatctccaactctagatgcagtggagagtaaaaaaggcatagattttttaaagtatgcacggaaagaaacagatgttggtagtgcccttcctgattcaggaaaaggattttcttgggaaaacaggcataataatgtgttatctgggcagtctttgcaagaggctcaagaagaagggaattccatattgcatgagagaagaggaagaccagaaatccccttagatgaggaacaaagaggccatacacatatttctgatgattcagaagtggtatttccttatgatttgaacttgaccatggaagacagtgatggtataacctacaccttaaaatgtgatagtagtggaaatgctccagagattgtatctactgtccatgaagactattctggatcttctgcaagttcaagcgatgaaagtgattctgaagatacagagtctgatgatagcagtattccaagaaaccgactccagtctgttgtggttgtgccaaagaattctactttgcccatggaagagacaagtccctgttcttctcggagcagtcagagctacaaacattattctgaccgctgggaagatggattagagaccaggagacatgcatatgaggaagagtatgagagtaaaggctgttctcaaactgaaaaatacttccttcataaaggaacagagagaagtgcagaaagttgttattcacagtttggcaggaaagcagataatcacctgcctgacattgctcatgctcagagtgacggggttgatagtacaagtcagacagactcgagatctgaccatctaggtcacctgaatccagaggacacattaagagccaaaacatctaggccacaagagctaccagtttattctgacgattttgaagatctcccaaataagtctcggcagcagatgattttctctaatcggccagatagtagtagactaggaaaaacagagctgagtttttcttcc

SEQ ID NO: 35404 - DNA, 1080 bp, Mus musculus
gatggagaagcagtgatgtaggtggaggatgagaattcaaggccgctcttgcttgtgtatcaagttgagaacagcctggcctacatgagaccctttctcaaaaaacacaaagcaaaatgaagaagaaaaagaattcattatagaaataccaacttcgggctggtgagatggctcagtgggtaagagcacccgactgctcttctgaaggtccagagttcaaatcccagcaaccacatggtggctcacaaccatctgtaacaaagatctgactccctcttctggtgtgtctgaagacagctacagtgtacttacatataataataaaataaatcttaaaaataaaaaaaatacataccaacttcagtatatatgtatgaagagaataatatccttgtttatccatcctttatcaacttttggataatattctttgacttataccaaccatattgtactccttttggagcttggagagatggcatagtggttaagagcactgactgctcttccagaggacttgggttcaattcccagcacctgcatgggagctcacaactgtctggaactccagtctcatgggatctgacatcctcacagagacatacatgcaggtaaaacacaggcatacaaataaaccataaatcaatggcttttgaaggctgagtggcggcatactcctttgatcccatcagttaggaaatagaggcacgtggatctctgtgagtttcaaggctaccctgggtctgcattgtaaatccaagccagccagggctctgaagttagcaaggtagagtggtatatgcttgtcttcccacattgaaaccgtggaaggaacaatattaaatagaaccaataaagtgaaggggtagaaatttcaagtagggtgtagaattctgaaagcttccctcctccccagattatacctttattacctttgatgcttatattaaaaggcacagagattaagtttctaggatattttaatccttgctattatagaagaagatttaattttcttactttgtctagtgtggggttttttttttgttgttgttattttttgtttttgttttttttacc

SEQ ID NO: 35405 - DNA, 1155 bp, Mus musculus
aactgtgttagcaattttatttctagcacaaataatttatatagcttcttattttcatgtttcaataagtagttttattggcctgttttacctgacaggtgatacaagattaggaaaacgatgaagccagtcctgctggtgcatgtctgtaatcaagctacgtgggaggctgaggcaagaaagccataggttcaaagccagactgaccaacctgttgaaactgtctcaaaaatagaaagtagtgagggggctgaaaatgaagcatattagtagaactcttgttcaacttgtacaacccatggattgaatttgtcttccccactgcccccacacattcagaaattaagagaaggaatggtggtgaaaaaggaatatttttttttttacaagcagttcgtaggcatttctattagaagcaggtttgtaagtctattaatattaaaacgtttatatttcctgtaggttggtataattcttaacatgttgtcactcttacatgctttagttttgcaaacctcattctcctgttccctgacagcaaagaagctcagaagtgtttctgtgggtcagccaactgccggggctacttgggaggagaaaacagagtcagtatcagagctgcaggagggaagatgaaaaaggaacgctctcgaaagaaggattcagtaagttttcggctctctgttcaagttttaaggaaatagcttttctgattaatttaacaggaaaatccaggtttggagtagataccagaaaagaagtatggatggctgtttttattttactttaatagattataatagaaaactgcttaaagtttttggtttataattcctctgagcttgtctttgtttgggatggacacggctctgccaaatgtgcaggttaaggcacagtgtgcaggagtctgtttgttacctgttcccagggatcaaacccagatcatcaggaatggcaacaagcactgagccatctaacctgccctatatgtatatgtattttattgaataaacacaccagtttgtttaactgtgtcacacatatttgtattgtttatttgtgttttgccattatgaatgtgacagtagttagcatcataggcatttcctggtacatgttgtgcagacgtttttctgtatgttgttcttataagtg

SEQ ID NO: 35406 - DNA, 1109 bp, Mus musculus
tcaatcacacttagtggcatgggtaggcattatgtcattaccctgtactttttaattataggttctcttccatcttaaaaggaaacaatgttataaccttctacatctatatttatgaagacatagttgttaatttagtaagacagtacccaaaatgtactgttttctgtatctgagtcctcacctgattttgaaaggtccgctatacggagtgattgattaattttttattatgtttaatcagattataaagactttggagcatttgcccattcctactaaaaatatgttggaagaaagcaaagtacttccaattattcagcgctggtctcaaactaagactgctgttcctcagttaagtgaaggagacgggtattctagtgagaatacatcacgtgctcacacaccgcttaatacaccggacccttctgccaagccgagcacggaaatggatacagatactcccaagaaactcatattccgcagactgaagattataagtgaaaatagcatggacagtgcagtctcggacgtcactagtgagctagaatgcaaggatggcaaagaggaccttgatcagttagagactgtcactgtggaagaggatgaagagctgcagtcccagcagctcctcccacagcagctgtgcgagtccaaagttgagagtgaagccactattgaagtcagtaagttacccacatctgaaccggaggcagacacggagacagagcccaaagacagcaatggcacaaaactagaagaaactattgctgaggaaacaccatcccaagatgaagaagagggagtgtctgatgttgaaagtgagagaagccaggagccaccagataaaacagtggatataagtgatttggctaccaagttactagacagttggaaagatctaaaggtaagattaaccttttttgtgttgtcataacagaattatttagattccgtgtgctgtaacctaaataaaaactgacatttttagcaatgaatatttttgaaaaatggaatatgatctctcagtttgtgatagatgtgtctccagtgttaagtttttgtaagagccataactatcaaaccataatacagataatgtccatctt

SEQ ID NO: 35407 - DNA, 1696 bp, Mus musculus
gctgtgctttttgctgccttttctaatgatcccatctgcacagttgagcagcatgtctcctaccttctgtctgcagatgtctcagttcattgtccagtgcctgaatccttaccggaaacctgactgcaaggtgggcaggatcaccaccactgaagatttcaagcacctcgcccgaaaggtacttcccacacttctcatctgtctgtgcacctcaaagatgctctctcaggaagtatggcttatgtgccagatgctaaggcttggggcccaggagcaggaggcaaggttcagaggtaggaaaggagagatctaagagactttgaaagctcggtttctcctgtgtcctgtaccagcttgccccaatccaccctttgagttaattccaagcctgtcctccctgtcaagacattgtcccttcttctgatggtatctgtggtctctccttctgtgccccgaacagctgactcatggagttatgaataaggagctgaagtactgtaagaaccccgaggacctggagtgcaatgagaatgtgaaacacaaaaccaaggagtacatcaagaagtacatgcagaagtttggggctgtttacaaacctaaagaggacactgaactagagtgacctcaggccagagtggagtatgagcggaaaggatgaatcctgtggcttctgccctaccccacggccaaggctgtgctactgatgtgatgacccaccatcctgagcagttcaaacctgcaggtgtcagctgtaagctgcaaaagtgagctctgtctccaaatgacccctagttgtgagctgttggtgtaacagttacaggccatcagaggcagtagcctagggaagaccttggccacacgaccccattctcaaatctgggtctcccccttggcggtgctgtcagcgcacagacccatgcgcacctcccccagatcctttaccctgacaatatgtattatattttaatgtatatgtgaagatattgaaaataatttgtttttcctggtttttgttctgtttttgtttgctgttagcatctatgtgctggaatcaaggaaagactttgtgaggatagtataaattctcctgcaaggttggatttgttatcatgtaaatatcccaacgcaggctgccttgtggtttggccgccttgtgctatgttgataagattgatttactgcttcagatcactttactttatccaatttttactgaactttttatgtaaaaaataaaatcaattaaagaacttggaatgtgtgctccctcaaaattaatcaggtttgtttgtgttgatgtgaaaggatgtagtggtcctggtgtgtggaggctgagattaacctttctactgcagttcattataagcttggttcttgagcctgagcttacttgagcttacagtttagtcattccagaccagaggatgtctgtcctgagacctcattgccactggcttgttttaatttggctagtgggtcaatcaagagaaaatgtcttcactcttggctggagaatgtcactggaccattttgccttcagacttcacttctcccaccccacaggagtgttccttcagtgtgtggggcctagcttctcactttactttacactgggcctagacaagagagaaagcagcaaaggacaggacagctgtggcaggggtgcaggcaccggcatatggtaagagtgtctgtg

SEQ ID NO: 35408 - DNA, 1208 bp, Mus musculus
agaagatgcaatagcaagacgtttggatgcttccggaagatgacaaggcacatctgggagtgactgtccacaatggcaagcaaagggccatttacgtgtacctatgtgcacgtctgtgtgtgagagtgcccacagagggtgtaagagggcatcaacccccccaggagattgagttaaaggtggctgtgatccatccaatgtggtgttgggaacagaactcctgtcctgaggcggtacaagccccagtaaccacttagcaggcacgtgtggttcagggatcctgggggatcaaactcaggttgtcatacttggtggcatgtgtctgtctgctgagccattcttgccgctccagggccagccatgtagtcctttaacacatggtaaactctaatgtatttggaaagttctgccaagatggtctacctaggtgaggctgccgtggctccctatcttgaccactgtctgtcttcacagatacagccctgcaggggcaggacggggacagggaaggaatgtgggtaggagctgggggagccctagcccccaatacctcctccctatttccccctgagcctccaggggcctcgagcaacatcattcctgtctactgtgctctcctagctacagtgatccttggtctgctggcctatgtggccttcaaatggtaggtggtctgggtcctgtcctgtggcatcccctccatgcctggactctgaggcagttccttgtcttagtgccctctgccccctacagctggcgctcacataagcaaaggcaacagttggctaaagctcggactgtagagctaggggaccctgacagggaccagaggcgtggtgacagcaacgtcttcgtggactctcctcctagtctggagccctgtattcccagccagggtgagcacgtttcctagtctgtctgtagtcctttgtatttaactagtgcctcccctacccactaacacttctctcttcacccccacccccacccccacccaggaccacacccggaccttggctgccagctttacctgcatattccacagcagcagcaggaggaagtccagcggctcctgatgatgggtgagccagccaagggctggcaggagctggcaggccacctcggctaccaagctgaggctgtggaaaccatggcctgtgaccaaatgccagcctataccctgctaaggaactgggctgcccaagaag

SEQ ID NO: 35409 - DNA, 1197 bp, Mus musculus
aggaattcagcttagccagacttcaaatgaagacaaagtagatgcacgaaaaggtgtctgttagctggcttccttgcagttgtgactcagtgtacacctacttccctgctccagattgcggcccgccgtgcctcccctgcccatgaaagtgccggtccacagtgtgtctgtgaccaaggagcgcagtcatgtgctggtgggcctggaagatggcaaattgatcgttgtgggcgctgggcagccttctgaggtgaggaagagggcagcttggccggccgggcaggagggtggcgggttgtggggtgcggctgccagggctcaccgcatctcatcccatccctactcccgctaggtacgcagcagccagttcgcgcggaggctgtggcgctcctcgcggcgaatctcccaggtgtcctctggggagactgaatacaatcctggcgaggctcgctgaacctagagtctaggcgctcagacatcagacccggcccgagcctgattctctgcccaggagactactgcaccagggggtgggcggggcccaccctccagctcagggattggtagatggcatcaccaggaagtcccgcccctcgccggctgaggggagacctagcgtcggcctctgaggccgctgctgcatattttgcacaatctggggtgggagggaatccctactttcaaatcccacgtcccagtgaaagcacaaagaccacctgtggccttaatcctcaaaggtgactatcgctgcccattctcagcaataaacgtggcctagttttgtaatctttcggtttcttgagtacacatgtgccgccgtccttggcctcctgtggcccccagtcttagcctctgttaccctgtctggcctggcatgcttcttcctggccaggctggcctcggtgtagccagcggaggcgcctctggctttgccagacgtttcctgactcctggttctcagctctcgcggtccattgcatggcatttgcatgccagtggcctgctctgccaggcacgctggtgtcggcttctgtgaactccgagtgcttctgcgtgctccggcgtggggcgggggcgggaccgcgccctcgagctcggccccgcctcttcattgtcctgctcccctcttcaacaccacccccccactggcccgccccttgccttggctcactcttgggcagaccggaacctgccctc

SEQ ID NO: 35410 - DNA, 1197 bp, Mus musculus; identical to SEQ ID NO: 35409

SEQ ID NO: 35411 - DNA, 1120 bp, Mus musculus
tagacgctgaagaggggaagtggccttggcaggtgagcgttcgggtcaggcacatgcatgtctgtggaggttccctcatcaattcccagtgggtgctgactgccgcccattgtatttacaggtgaggagtcttggggagggatctggagggaaaccctgctgtctaatctacctgcctgacagaaacattccagaacaaaagaagggggtggccgtgctatgaccatcttgttactagaaatatttagggtgtggcacaggcaaaacagttgagagattaataaagagttttagtgacagacacaggatgatagagatttgggacatgttgagaagcagggacggagtggaaggggtataagagagcttggtggggtcatggctaacgaggcaacacattttttccatagccgaatccagtacaacgtcaaggtgggcgatcggagtgtctaccgacagaatacaagtctggtgattcccatcaagaccatctttgtccaccctaagttctcaacaactatcgtcgttaaaaatgatattgctcttctcaagctccaacaccctgtgaatttcaccactaacatataccctgtctgcatcccttcagagagttttcctgtaaaagctgggaccaaatgttgggtgacaggatggggaaaactagtgccaggcggtaagactggtgctcagaagaccttcttcctggggtagaaacaaaagatcccaaggggcacagaagagaagcagactccttggcaggcatgtgtgtgtgtttgtgtgtgtgtgtatgtgtgtgtgtgtgtgtgtgtgtgtgttgttgggtaggcagtttggcagaaatcaaggtcatggtcagcttaagtgatccttggtcttgtgttgaaatcttttgtcacaacgcaaacatctgatgacagcccacagaaggtatccctctctcctgggaactggaaatgtgtcaaatctccttttgcagatttgtggggcagtatgctgaatggttataggaattgctactttcccagtggacaaaggccaaatgtgatggaattctcctgtgtggatatccagatctgatttattttatttggtgtgttataagtgttttgcctccatgcat

SEQ ID NO: 35412 - DNA, 2041 bp, Mus musculus
tccccactctatgtggctagggcttttaaaattgactgtggaagttcattaagcaaatgtctttaccattgcatcctgggtattgtatatagattagcaaggaacggtagagtgattagatgaatggaggccatattttcttcctggaattttggttctgttgtccccttaccagagcctaaccaaggtctgcaccatctgtggttttgatgtaagatcttcggggagcgtaagagtgttatgtagctactgctgatcctgtaggtgaatacactgtcctctttgagttaggccccagcagagttctggatcgtgaaggcagcagggagctggaaggatttcctttagtgactgagtatctcaacctttcagatggtcacgtgatggaccaggacctcaaagcatccgggactccgtgtcaaacgccgtctgtgacgaccacttttatgctagctggcgcctgcctttttctagatatgaaagtataggtgtcatgtgaattccatgccagtgccatagcaaagatgtcattcatcttgatgctcacagtgaatccctaatgttacccctcaaaacactaactaggccttacctctgcacagcccctcctctttctggaaaactatggcgtgtgtgccaagcactgtaacagcgagttacattcctagcctaaaagctactctaagaatgtgctgtctgccatagcctgagtttcttgatagaagtaactctcttacttttcttcctaagacttttaaacagttctgaaggttattattaaatcccaatgtgcaactggaagtaaattcagagtagctgaaaacagctaaattatctttaagcagggaggtggtggtgtctaccttaaatcaggcaaaggcaggtatatttcttgagttccaggacagacaggcctacacagaaaccctgtctcggggagaaaaaagagagagagagaagaaaaactattatcttaaaagaaaattaatggaccaggcattgtggcagatggctttaatcccagccctcaggaggtagggataggaggatctcaagagttcaaggccagcctggtctatgtagcgaacccctgtctcaaaaaggaaaaagcatcctacgagggagttgaggaagtaatgagggtctgtgcagagggagcagcagatggggaagtgactaagactggggaaacagagtggattgtttgattgatgtttacggaggtactgggaatttaaaagctaagttcttcagccaagcacagtggtgcacactattaatgtcagctctcaggaggctacaacaggactactaaaagctcatgtccaacctgggctatgtacagagtaccaggccaacaaagactgaatggcaagaccctcacagaaaacccaaacacccgagtctcttttctgcaaaagtacgaaggctttctccaagctatatacaattattcaactgttgtggaggaaagaaagtgtttattattgtagtagtaaaccagattataaaaaccacgtattgtcaagtcagtttttataataattgttcatgaatatgcacagtaaaaatgggaactctgaacaaaatgtgagtagtgccttatttctaagtggtaagttaaatagtttgttgtttactatgtatacagcattctgtctgggccagaaaggcaccagatctcattcgattatgagccaccatgtggttgctgggacttgaactcaggacctctggaagagcagccagtgctcttaaccactgagccatctctttagcccccctttttcttattttttgaaatgtggtcttactttgaacgtagcataggctagccttgaccttgatctttcagcttcttgagcaggactagaggtgtgcaccgccacccagtctgttctttgcaatgctgaagaccaatgcaggccttcctgtgttctatgcaaacattctgcctgctgagctacattgtcagaaccaccccagccccaagaagcatcaaaagccaggtattatatctcacatctgtaatctcagcact

SEQ ID NO: 35413 - DNA, 2059 bp, Mus musculus
cggaggatgaccttgaactcctcatcctcctgcttccaccacctgagtatgggaagtacaggcatgctcagtttatgtgatgctagggatcagaaccagggctctgtgcatgctagggaggcgctctgccaactgagccatgtgggggatgattaaagaaaaagacggatgaattgcgtgtggctcagtggagaaaagaaagaatgaataaatggatgtgttagagaaaccactgctccagaaggaaaataccttcatactctgtaaatgctgctaagaaaataatcaaggagtaaatatagatataaatatatatccctgctatcctgaaaccaaagttccagacggtggttgtgaccagtgtgtgggtgctgggaatcaaacccaggccctctggcagagcagctagtgatcttgactgcagagacatctctccaacacacagaagaggaattttgctgttgaacagtcccagtaaacacgtgcgctttctgtgctttccctacagatttgtaagccttgtggacaatcccattgataagaccggatgtcaagacactgaagacacagtagagagcgagcgggaccgccagcattttgataaggaatttatgaaagcatatattgaagaccttaaagaaagaggtgagttgggacaatgtaaaaaccgtctaagggctggtgagatggctcagtggttaagagcactgactgctcttctgaaggtcctgtgttcaaatcccagcaaccacatggtggcttacaaccatccataatgagatctgacaccctcttctggtgtgtctgaagacagctacagtgtaattacatataataaataaataaatcttaaaaaaaaaacaaaaacaaaaaccgccgggcaccacgcctttaatcccagcacttgggaggcagaggcaggtggatttctgagtttgaggccagcctggtctacaaagtgagttccaggacagccagggctacacagagaaaccctgtctcgaaaaaccaaaaaccaaaccaaaacaaaaaacaacaacaacgacaacaaaaaaaacccaaaacaaaaaacatctaaaatgatataaattgacaaaaaaaattatttgtggctatttgtgaaccacaatgatagcatgcattcctttgatcccagcattcaggaggcataggcaggtggatctcagtgagttcaaggccagcctggtccagctccacccagagaaactctgttttgaaaacaaacaaacaaaaaaggtaaataagtaaataaaaatctaagtatatatttctattttttctttattacagaagctgttcccagttatacgaccaaagtgtcatttagtcttcagctttgattcggttcaccagaagatgacaaaaatcttactgccccgtgctctaaatctttgaatatgtgttacctcttattggaattgcggcttgtgcttaaggacaaagtctagaaactactaccatcatcactgttaagaaagataacattcaaattattgataaacttgcttatatattaatgttagcagacgaatgcacatacttgtcctaaatactgcatatttaataatttaggaaacacatcacttaaaaattacaacatttaaaaaaattacaacacctagaacaagttttgaaattggatgcattatgttcaggaatcaagggctagagggttgtgggtgaaatggagaatttaccaccttgaaaatgtttcagggggctggctcagtggttaagagagcctgttcttccgaaggtccagagttcaaatcccagcaaccacatggtggctcacaaccatccgtaacaaaatctgatgccctcttctggagtgtctgaagacaactacagagtacttacatatagtaaataaataaatctaaaaaaaaaaaaaaaaagaaaaagaaaatatttcagtatactgtttatttttattgagaacaacgctccttgagtctaaacaacttcctacttccatatttcaaatttattttggcaagtacattttaagttgtactttgactctcaggagagcctg

SEQ ID NO: 35414 - DNA, 1200 bp, Mus musculus
aactcaggacctctggaagaaagccagtgttcttaactgtggagccatcttaccagcccctattttttggtgtcattcttgttgccacagccctgcctcagcctcccgagtgttgggagaatagctgtgtgccagcacaccacgcatatgctgtgttggaaaatgtacagcttctcacctagccccccgtggctctagtacagatgggcttcagagcgtttccttggcaccttctccttgattctgacttcacaactttttttttgttattggtgataacataattttttgtcacatgtaacaatttatagaaatgttcttatctgtttgagcttctaaatgctacttgtgacatagaaatgcatttaataaagaaatgcaaaacctgcacactgaaaacatgatgtctcatggcaaaataaggaggacgaaataactgcaagaatcctatgactttgagactggggcttaatgttgctaaggcagtccccaaagtgagtcatagagtccttgtaattgccattttaattcagggtgcatttttctttgtcatttatttattaaaaaaaaaaaaagacaaacttcctaaaatttacatggaagtgcacaggattctcagaccaaaaatcttaaaggaacaagataaaagttggatgactcacttttccaactttaacaattatacaaagccatgtatggcttcaaagtaatgaagatggtgtacaatataaagaaaagtatatagattgatggaataaaaccaagttaaccctcgcgtcaccatgtgcctgtactttgatagccaggagactagaaattctgtttacttctataattagtgtggatgggcagtgtgtgggcatgctaggcgaaggtgtgaggtaagagagcaatgcttgggactgggcttttccccttgcgcctttacatgagttgggacttgaacacgtgttgtccagcttgcttggcaagcacttaaacccatgaactcatcctggtttaccacctgatgtctcataagggcggcaggataagttcctagagaaagagtagtattttcagcaaatagtgccaggacaagtagatgttcacatgtaaaagaataaaattggatccctgcctcatccgtattcaaagttaacttcatgaatcatagaagcaggagttaatattctggccttgggataggcaatagttttt

SEQ ID NO: 35415 - DNA, 1140 bp, Mus musculus
gctttaaaaaaaacaaagagacaaagacaggtttctctgtgtagccctggctgccctggaactccttttgtagaccagattggcctcaaactcagaaatctgcctgtctctgctttccattgctgggagcttttttgagggaacacctttaaatttaacagaattagcagcaacaattaaggcagcaaatgcagttcgtgccgatgcacttgtcattgcattttatataaaagtctaggacactgatgctagtcacttaatccttgccggtctcagatgctcactggagatgtcgatggtgatagctgcgcatgctcagcctcactctatcttaagtcccagacatattcaaaggatccccttgcccagctcagctgcctacttcataagcttaaacatttgttttctacattttattttatatgtctgagtgctttgcttgcatatgtctgatacaccatgtgtgtgtctggtgcccacggaagtcagaagagggcattagatggcctggaactagagttacagatggttgttagccgtcgtgtggatgctaggaactgaatcccaggtcctctgcaagaacagcaaagtgctcctaatcactgagctctctctagggccatagttcacagaattttaagtgttttttttttttttcctactacatttgcagaccagctggcagtagggctggactggcctgcatctgcatgtccattaatactgatactggttgggtctcctttcttgttttcgtttagggcactttcatgatgttttttttctggtaccaaatccacttgtgtgtgtgtgtgtgtgtgtgtgtgtgtgtgtgtgtgtgtatgtgtgtgtgtgtgtgtgtgtgtgtgtgtgtgtatgtgtgtgtgtgtgtgtatgtgtgtgtgtgtgtgtgtgtatgtgtgtgtgtgtgtatgtgtgtatgtgtgtgtgtgtgtatgcatgaatgtatgtatgtatgtatgtatgtatgatcgctctatgttgcctagtatgctgtaggacctgaactgctgtggtccttctccctcagcctgctaagtaactgaaactaactgagattacaagttcatcctacaacacttagtgtgggttgttattgttcgagacagtctctactta

SEQ ID NO: 35416 - DNA, 1227 bp, Mus musculus
gatgaagcacagaaagggtcgagcttatttgatgggaaccagagggttgggaaacaacattttgtttgtgaggcatccaaggcttacactgagcaatggtgaggcaagtttaccctccatggggtcagacaccccagatatggtgggagctatgatccaggagccagtctcagaaatgttaggaagaggagataaagatctctcccataggccatgctcccttaaataattgcttcctttgcttccttacaagccttgtttcctctgctcagccctgtgggatctcaagcctcctgcagaggctgctttgtaagccttgcacagctcacccacactcaccactgagacctttccaggcgcagtgcctgtcttgtcattatgtggggagataagtggtgtgtcatatattttccagagtgacatgcctggctccacgtcaaagccctggaagtggactgtggagcacattatctataaagccttccgctcacacctcctacctccgaagcatttcacagaagatggcaatgtcctgcagcttgccaacctgccagatctatacaaagtctttgagcggtgttaaatacaatcatagccaccgtagagactgcatgaccatccaaggcgaagtgtatggtactaatctggaagccacagaataggacacttggtttccaagctccagggtttccagtgctcactattcttgttctgtatcccagtattggtgctgcaacttaatgtacttcacctgtggattggctgcaaataaactcacgtgtattggtgtgattttttttttttatataaccgcacattggaaaactttctaaaatgattttcaactagtaaatactgggtagagttgatgatgtcaaaaagaagtttgaaagcctctgggcactgaggaggcatttctacacacactcttaaaaaagctcttcaagtttccccaaatcatgttctgatggtggtggtctggaaagctgctgtctgacaccaagcttcgtcagttcagattcctttaaaagaatccctggaatagcatttttgagaagcccgtgtccatgtcttaggtttcctgcatctcatccctcaaggttcaggcttaattaaatccatcttaaaactttcttaactctagttttgcaaaacaaatcccaaggttgggcactgtgcatgtcttgactccagcacttgggaggcagagacaggtagatctatgtg

SEQ ID NO: 35417 - DNA, 1200 bp, Mus musculus
tgcggagggtgacggggccctgtgcctggtgtgtcgccgcctggtcgcctctactcgggaacgcgacgtgaggcgccactacgaggccgagcacgaattctacgagcggtttgtaggggacgaggaacgcgcggccctggtcgagcgtctgcggcagggtgacatgtctttggccgccgtgctcactccggaggagagagcgacccgggcaggcctcggcctctgccgcttcttggccttgaagggtcgcggctggggtgagggtgacttcgtacaccagtgcatggaggtgttgctgagagaggtgctgccggatcacgtcggcgtcctggaaggcattgacttgtctccagagatcacacggcagaggattctgagcattgacagcaacctccgcagccagctgtttaaccgagccagggactttaaggcctattcccttgctttggatgaccaggcttttgtggcctatgagaactacctgctggtcttcatccgtggcgtcggccgcgacctggaggtgcaagaagatcttctgacgattatcaacctgactcatcacttcagtgttggggctctcatgtcggcaattctggaagccctgcagacagcagggctcagcttacagcgaatggttggactgaccacgacccacactttaaggatgatcggcgagaactccggactggtctcctacatgagagagaaggccgtgagtcccaactgttggaacgtaatccactattcgggatttcttcacttggaactgttgagttcttatgatgttgatattaatcagatcataaataccatatctgaatgggtagttatgattaagaccagaggtgttaggcgaccggagtttcagcctctactaactgagtctgagtcagagcatggtgaaagagttaacggacggtgtttgaacaactggctgagaagaggcaaaacgttaaaactaatattttcactaagaaaagaaatcgaggcgttcttggtctcagtgggggcaacaacagttcatttctcagacaagcagtggctttgtgattttggtttcttggtagatattatggactatcttcgagagatcagtgaagaactgcagatcagtaaagtctttgctgctgctgcctttgaacgcatctgcacctttgagggtaagctgagttcacttcagagacatatggaggaagtaaa

SEQ ID NO: 35418 - DNA, 1135 bp, Mus musculus
gacttagaacttttctcaaatccatttagctttaaaccggaatatgcgcctatttctgtaagagtggagctaacaaaacttcaggccaacactgacctgtggaatgagtacagagtcaaagacttgggacagttttatgcaggactgtctggtgaagcttacccaattatcaaaggggttgcctataaggtggcatccttatttgatagtaaccagatctgtgataaggcttttgcatatttaactcgaaaccagcacacattgagccagccactgacggatgagcatctccaagcactgtttcgagttgccacaactgaaatggatcctcgttgggatgatcttgtgagagaaagaaatgattcgtaagccgttgtggtccaagaagttgatttgaaaagggaaaattaatttgatttttctttcacatttcctcatttggatggttggaaagcattgaacttactacagatgttcaaattgataagcattgaaatctttctgacaagttgcctttctccatctcatttggcaacatgggactgactgaagcataagaataccacctttaaaaaacttagtttaatggaaaagtcattgttctttccttttattattactgattttcaacaaatttagtattgatattgtcagttgaactagaagtctggttttaaaatggtttaaagatatatgccaaaagtttcagctcttattttgacacagtggaaagtgtgacacgtggtttgaaatgaccaactccttaaaagtgtatttgagccagtttacagaaactcacatatcaaattaagtttctgaaaaggaatagcataaacacagtggaggtattttatctagataacagaatttaagattattttttaaagcatatttctaagtaaatacaatccccccatccccacctacccagttgatggtgacattacggatggaggaagtaatcaatttggtgttggagcagcaagaattattttaaattcctgatttaggagtttcttactatcaggagttaagaataaccaattattggtggtttgctccttattttttcacagctggagcaattttttcagctcatctatcaaaggaccatggtaagtatggaatcttgatc

SEQ ID NO: 35419 - DNA, 1140 bp, Mus musculus
agtcatccagagatttgatcctgttgcaaaactaggtttttgtcaaccttcaggttaagggtttctcatttttatctcgtatttaaaaagttgtttcatcctacagtgtaagaacgttataaatactctatcatttctgccttgaaactgaccaaatactgaattcatgtatactttgtctaaagcagccaatggccaccacaaagtatttttttttcttctttaataaagggtagatgtcccatctcccagctcatctcaaggggcacctctctagaacataacttgtccctgtgtcgttattttgttctatcttccagtagcgtctccctgatgcctcccaaataatcactaagcaaactgtttagtgttttagttctgcatcaggattgctgaagttgccggaagcagacaaaagtttagttgtttgtgacaggttgtctgagctgtcagactccaacccctacaggccaagtctgtcctggcccatccttctctgaggaaattattacaggagttagagccgtgtctgtctaggaactgtcatggctgctcccctctacagttgcagacttgagtagttgtgacactgtgtgcaacacaagctaaaatactttttggaaaagttcactgtttcctgctttaaattgtccctacctaccctggggactaagcagatatactcaataggagtcgacagcccactctgggcaaagagaaaagaaagtttggctctgtaagcccatagccacaccagatctcaagtgcaaattcctccatacaggtgggaggaaggtgaactatttggaagataacactactggtcctagttacatcactctaaatatgtctttgctttttcattgagataaaagtttacaaatattcagtgtccacttctttttatattcacctgtgaatgcacctctcagatcaaggtaggaaatatttctgttactccagtaggtgccctttgcctctcacagatagagaactgctggtctgacttgtattgcctgtcagttagttttgcctgttttaaatgtatatcaagaggaattaaatacactgttgtatcctctgttctctgtgtctgctatagtagtccatgttgtggagtgtaacacctcatttttcact

SEQ ID NO: 35420 - DNA, 1228 bp, Mus musculus
ataaagaagaaaataatccttgccatccagcagttgggaaatggtgagtggacccagggcctgcagaagaggctgaaacactcaaaagggaatatccagctctttgaagcaaagctggacaaaggtgccaggatgctgtgggagcttgccatcgacttctctgctcggtgcagtgagaactctgagaaaattataggtacggagcggaacacctactccctggaaaaatcagggcgggtctatacagaaatcatccgcatctgggacattgtcttagatcactgcaagctgtcagattccatcatggctatctgtagtgcctacacccggggcctgtcctgtgtccttcgaaagaagctgaagggtatcaacaaaggacaggtatcagctaacatgaaaatccaaaagcggataccccgctgctatgtggaagacacagaggccgagaagagcttagagcaggtagatcctgagtactttcctccagccagtgctgtggagacagagtacagcatcatgaagttccacagcttcagtaccaacatggccttaaacattctcaatgatatgacagcaacggtggagtatccattccgagtgggcgagcttgagtacgccgtgattgacctcaaccctaagcccctagagcccatcatcctcattggacggagcggcactggaaaaacaacctgttgcttgtacaggctttggaagaaattccatgtttactgggagaaggctgagcaggcaggaagcccattgctgtccaaacagatcttgccaaagagaaggttggaagtagaaccaggaaaagagggtccaggtcgagaggaagaagaacatgaggaagaggagggttccatcaaagtggaaacggtggatggtatagatgaggagcaagagagtgaagcctgtgcaggaggagccacagtggagccagcaggggacagccaaggagcagagggatgtgtgccggaccacccacaccagctggagcatctacatcagatctttgtgacgaagaaccatgtcctgtgccaggaggtgcaaagaaattttattgagctctccaagtccaccaaggccaccagtcactataaaccactggatcccaatgtccacaaactccaggacctgagggatgaaaacttccctctgtttgtgacttctaaacagcttctcctcctgctcgatgcctctctgccaaaacctttttttctgagaaacg

SEQ ID NO: 35421 - DNA, 1234 bp, Mus musculus
cagggcaggctgtgtttgtgatgaccgaggcaggagccctggcttcgatgctccacgagagccactttccctttgctcccagcatcaggacaaagagcatttgctgagcattgcctggtgagccagctgctgagccagatagtgggttcagcactgccccagactcatagagacttctcagctgtagataagaccagcaatcccaagagatgaccaataacgcaagttcagaacagaactgctgttctgagaaagaagctggtaccaagtcggggcatctcagaggaagcagaacttgtaatttagtggtgaagcaagggtaaggttgaagaatacaaaatgtagggagggctggctacctggagcaagctgggcatgcataagatgtatctgcctaggaggtggaggtttcaggatacttttggaagatagcagcaaggaaggttctagaagatggtaaaaaaaatgactttaggtgtgagtgtcaagctaacagtaacatcaaagagccattttctgattaatgcgtaatttcattcatatgcactattgcattttgggaaccaatttcctatatctccatctgtccatactgtttgccccgtctttgaacttccccgagtgtggaatatattccttgctccgtggctttgaggccagctgtaaactcgctttgaccaccaagggcgaggctggagatacaggtttgcattggggccttacttctgtcgctaaatactgcagtgaccgaggtgtcccagcagagactgctggcccgtggaggatgcagatcctacccaagagagccttggtctcagtgagagtttcctcagtcactgcagccaaggctggaccacccagccatgccccactttgatcagctaatcgctggccataacacattcagagattaatccatgtatctacatgtcctgtcaatgcatgagctcaataaatctgtctgtatgtacatgctcctgcacacgtgagggcagatgtgcacatctgtgtgtggaggtcagaggtcaatgtcagggaaggtcttccttaatcaggtcccatgagaaaaggacaaaactggctcacaaaaagttgttccctggcttttatatgtgttgtggcatacacgtgtctatacatgtacattacacatacacaataaagcaatacaattttaaatgtgaaaaaaattctttagaaagtaaatatttcaagctctcaaactatgacacct

SEQ ID NO: 35422 - DNA, 1116 bp, Mus musculus
gcaatggtacccggagggttacaaaccaggagacaaaacaaaacaaaactctctgattagtcattggctgagtgtgttccctggggtgctaattacctgccaccatggtctttctgtatagaaggccaagcctgtgtcagtggtcagagggctccttcaggcaggagcagcagacacgcattggaaactttctgcgagcagtgggcaggaaggggtgagctgtggtagcatctcccacagcctgccctcccatctccatgcgattcacaggctctcaaccctacagctccatcccttcactgcctgtatccgtgcagatgcttcagcagctccttccagcctgtgtgctccggttcacagcaatctgctgtccatcaccacatggttaccctcagtgcaccttcagacggggtgctttggtccacacccacacaccagtcacagcactgcctccacgacagcggggtcggatggccttcatcctgcatctctcagagctcttccttctcgccagacacaggctgtgtggcactcctgggtttaggattgaccctatccagttttctccgaggccctagagatgagcacatggtttggcatcctaaacaaatgctccagactgaaccgggcatctatggctcatcgtttagcatgcagttgggactcattatctgtgtcccgagttgaacccacccttgtcttgcttggctgcctctttttagaataagcaataccaaaaaggagacaaaaccagaatcttacctctccctagggataagcttgttattttttgtcaaccctgtgagattagagctggaggtggtgaccaagggggatccggaagccagagaagacaggaggtcatcgggatacacacgtgtgcacacaccgtacatgtgaataggcagagctgtagcaaaaatgaaaagagaggaaacttaacagactgggagaggctgagcccagaagatggactgtcagggatgaatagaggtaagaagaaaagacaggaagagggaagattggaaagatagggccaagaggaggagaaaatatggccaaaccatatcctacttgggaaaatatagcacaaaagccctggagagagactctctg

SEQ ID NO: 35423 - DNA, 1429 bp, Mus musculus
acgttggcttaaagtccgatagctaaaccttggcaaaacataacaaacatttcattgctcagcctcagtgctctggagtattcagtgtatgagacaggtttatttgagtcctctgtaaatggcatttgaattttatattctcccctcccgagtatcttataagacatcccctgagttagggagttcccagactgctactctattccttatgaatgcaaaacaaccaccaatagaacaaagaaaaagaaaaaaatggcctgaatattctcttgggaaagggggttggaggtctataaagggaagggtaagtgtatcagaaatccaaagggaggaggggtcaggccagcagccatttcctcatgctctgtgttatgcctgcagggtcacagaggacaggcagcgtggtggtggggggcagctccttccagtccccctgccccagctcagctcctgagggacacctcttgccaactctctcatcctttaagttgctcaggatgttcttcgggtctcaggctaggtgccattaagctgcagtgcttgctttgccttcttaagcctgtcctgtttgactggtggaaagccgactcacgtgcctacctactgtgcttcctaggaaactagatggcggccctcacctgggcgggcttgtcagcacaccctaacctctgctcggtttgctgtgctcttgagaacgcactgcagaagttactgtgctcgatggcaggtcgagggttccactctggctcgagtatgttatcccgtttataattagactttctgctaccttcttaaatgaaggcacctcccccgacccccacacacaccccggccatttatgttggctctctaagcctcttatgaaatggattgattacctgccagctactgaagctttgccgagacaccagtcagaagaggggaaagccatccaacttggatttcctgtccccagagatggatggcttgactactcagcatggtgtcagtctctgagctggagaactatttctctgttccttggtccctttcttgattgagaaaagtgctcgtgtcacactgcacagcagccagtctctgagacgccgggtctacactctggcacccttgcatttatgtccccagtatcagtgaggatgtggcagttgtatccccacctctgtcccagccagctacctttttagtcaagacagattagtggtttttgttttttttgttttccagttgtgatttacagtttgtaagcattcctttgtatacatttcctaatttcatgaacaggataaaatagtaagcaggccttggttggctagtgggagtttttaaaccaatgacgagtatgtcttgaagccttgctacagccctgtggcctatgatttctaagacttgtgcagctagttgactcacagtgtagaaccgggcacaagct

SEQ ID NO: 35424 - DNA, 1563 bp, Mus musculus
gacattgtatttggtttgttgatggctttggtcttgatattcgggtcctaattccctaccttttgcttttttcctgtgattcatacttcatagttgaaaattataaagaaatttgagactaaattgagtagtttttagtgttgaagtagcacttatctttctgttaagcatttagtgtagagctagatagtcagcctagtcaagggttgagttcggtctgtgtattgtgtttgctgttgattcctgtttgcttctggttcccctgagttagcttgatgaagggttttcttccgtatttcagtttcaggactctgcttgaatcctttcctgtttcctggaatgcttcttccctgtgcgctcactttgtcttgccagcctgattgtgaggtgtgggaccaatttcttaatttttctggtacagttgaggggcagtggactgtgctaggaaacttggtaaggttgaacaggatcctgccagtagcgtatgcttgtctcaaagattaagccatacatggctaagtccgcacggctggtacagtgaaactgaatggctcattaaatcagttatggttcttttggtcactcgccccctcctgctcggatggataactgtggacattctagagctaatgcatgctgagggtgttgccccatcccgggcaggggagatgcctgtgcatttatcagtaaaaaccaacccggctgtgggtgctgggggctttggtaactccagataaccttgggcagatctcttgcctcctgtggtggtgacgacccatttgaacgtctgccctattaatttaagatggtcgtagagcctaccatgttgaccacgggtgatggtgaatcagggttccattctggagagggagcctgagaaccggctaccacgtccaaggaaggcagcaggtgtgcaaattacccactcccgacatggggaggttgtgacaaaaaataacaatacaggactctcttgaggccctgtaattggaatgagtctactttaaatcctttaatgaggatccactggagtgcaagtcttgtgcctactggacataccccagctggcaacctacacagacccacatcggaactccagattaaacaaagactgtgagtaacccctggtgctagttccaaagactcaagccttccaattctaaagacagacactctgtcttcttcccacttttattttggacagagctactacaccaaccctgtccaaatccagatagtccaactgaccattaacaaaaactctgatccacactcctctctccctactccctacttcctccagtcctgccgataaggtgccaccaaatccatatgctgcttctcttcctgctctacttttagggtgtacaaaaaacattccacccctgccatcttctagcattaccaaccaaggcaaaacacgggggtgggggtgggctacctgctagagcagccatgacgtggcagagcaggcccttccccgtcccccaggtgaaaagagcctggcaagcaagaacaatagatgagattttgctgctgagaattcaaacaaaacaaaacaaa

SEQ ID NO: 35425 - DNA, 1158 bp, Mus musculus
ctttaacttacccttaagagcgcagctttataataactacaaactctcagcaaacgaaatgtctgagggcagtgggatgaatgggcaccagtaagctgtgatacattcctaccagaaagccgtaaggagcagagtgaaccttccagtaatatcttcttatctagtgaagagagattagacgccacagtggatactgtacttctctcctgtgtgaggattcaggactgactggtttagttagaggttctgagagtgcttgtaagagccaaggcgaaggcagtctttacagctgggtactgatcatactaatacattggctttgtgaaaatttattatttgtttcttggaatttgtatgcttagctttgttataattttttttaaatcctagtagcttgagaatgttaagagttaattttttaaatggtaaggacacttagacttttcagcttgtatgtataggatgagaacacggtttccatgggaacttctgcctcctctttcagtgcctgactttctgtaagatttttgtgtctgttctgtcatgtgtgtgtgtgtgtgtgtgtgtctttaagagttaacaaaaaaaaagtttattttgaattgttctgatttcttaacagagtgattatatataaagcacaagttttaagctcattaatttctccatactggcttcctaatggtgttatgataaagggatgttttatttaagctagaagaatttgagggtgggaggttgagggtagaagagatgttaacaaaacatttgctgaaacagaatgtaattttagattatttatttatttttcccattaacaatcttaaattttttggggtcttgcctttgtccctatctaatagttatattggtggtgagtcttcatgtattcagaatgagtgggcatttgtagagtgagaacagaagggacaggaagaaaattgtcacatattgatctgaagtctgtggtaaagctgcttctctgcctcacccatcttgtttgccatggttggtttgcgcagggtcctagagaaaacggtttgtcagcagagtgcatggcatctgtcttgtgagtggaggagggagaagttgactggaggctgtgggcttgtatgtgaggagaggatagcagtgtcaccgtgcatactccggaaggag

SEQ ID NO: 35426 - DNA, 1172 bp, Mus musculus
tgcagaaaatgatttttgactaatgtaaaatttgtctgtgtacttgtagaaacagatcttgaaagaattaattcagttacagagttatagcagttaatagtgtccttccaccacacatgttgacctgtgctccaggtttccatctgtcttagtctgtccaggctgctataacatgcaatagctcagtactcctaagtaactaggacttactcctcagtactgtgaaggcccagtgtctgctgaggacccttctggctcctgcatgctgtcctccgtagaagaagtccttagctctctggagtgcctttaatgctctcataactagattgcctctcagaggcaccacctacctttaacacttagagtcagtatttcaacatatgaatagaaaggcacaaaaatctagacttacagaattgaattgaaatagctctcagtgggtgttgagagtaaaggagataagattattattagttaccatagtggttttttttttactgcaagtgtttgtttttgttttgttttcatgcttgtacttttgacatttccctccatttgaacttgcctttcctgtctcctatggcctatttccgtccacttaggtgtgatttgtatttgtgtcagagttgatctctcaatgctacttgatgttccattgccatgtgtggcgatgctctgctcattaactatgagagtgacaccactgttaactacctctccttgcctgacagtagtgctgccactattccttgtctctgtggtgatagatgaggtttgtatggtcctgttattccagcctccagacaccattccagatccactggtgccctctacgcccccgatgtgtgtggggcctcaggtgaaggatgagtacatttcactatcgtctctgcattcatctcagtctgcccttttctgttttcatcacataagattcattttaaagctcatttgtgttatgtaaatttaattgattagagaataaatcacttatgtttttcccccaagtaactctccttcctccctttagcaaccccttagcattttctaactggcagatgggcattgggttttttgtttgtttgtttggttttggggggtacaactcgtatcatttttgaatatagaattgttttatgttctcagttatgtatatatatatatatatatat

SEQ ID NO: 35427 - DNA, 1149 bp, Mus musculus
tctccagccctttgttttgtttttttgagacaaggcttcactttatggttctggctagcctggaactcactgtgtaatcctgactaactttgaactcacagagtttaaaggttgtaccaccattgcaggtattaactacactgtaataaatcagaattgtagttgtaggattctactttcatctttcatagcacagacataactatcaagttcatggaaaatttctaatactaaaccaaagttgcacctgagaaaataaagtttaatttacaaatggcaaacggtctataactaataagaatagtttgagtttctttgggaaactagtggtttttgtttatttgtttacttttttggttctgtagcataggtgtgtctctctaaatggaaggacactgacaggactagagataaccctggcagtaagcagttctttggtatctgtgttatataactgggtatttctaattgtaggcattgctaatgccaattcactgtgctgtttagcaaaatgttcttcattgtttttaatttctctctttaaaaattgactgctctcagctcttaggagacatacggactaaggtatagacactgctattttctgacatcttatgatatcatagcttgttttctttgcttcatcaacttaacagttaatagtcgtctacaaaaaataagatctttagctgtctatctattactctgtcattgtcattgtcattgtctgtgggggatactgactgaacatagtgtcttagggaggtgccactttttcacacctgagatgagtcatttacactggagtctttaattgacctggtccaggagcccatctaagtaaacattgttattctaaattgagttagtgtctgtaggtcagtaaagagttactggtggcagcagctttgtaaaagcatttggttatttgtgttcagatagtacgtctttaaaacttttggactggagagctactatctgtagatgcttggaattgctgtacttggtgtgtttcctggtagtagccccaccactccctagccaaatctaggtatcagagtatgtacatttgtttccagtttctgcatgggattctcaaagcagctgtttacctcatgacacttttaatatcaaggcataatcggcagt

SEQ ID NO: 35428 - DNA, 1251 bp, Mus musculus
caggcgcggaccccactgctgatgtttctggacagagttagtgctgccgacggcgcctcccagtctctgagaggacaactggctgccctcctcaaggaaaggacactcaagtacagctttgggactcagctgcggtttcccaggtctagcttttcgttttgttctgttttgtattttctgtaacagaggggtgtcctcagtctgcatgtaactttatgatagttattccaagttcaggagaagcagtattaacatcagttgatcagtacaaagtaattttttaatctaattcaccatttcacatgtttgtacttctttgtcttcccattaacctttgccagtgttatgattgtatacatttttaaaaatgctggttaaacaggaatgcttaaagctttaaaagttttaacagtctaaactttgttttgccttcattcaactgcagaagaatatttttattgttacttttgttctgtatcatgtcctatgctagaaatactgacaataatgtgagacaaagcagggctacgtggcactccagccagactctgtggatgtgcgctgatgctcgtcatcagcagcaactcctttgggatgacctcaatgagaaatgtcatggaaccagccagttctgtaagactgacgatagtgtctgtcggttcttgatcttgccacctttatttaaagccgtgtcccttcttttaccccgtaagaaagctgcaccagatcacctgcctaggtttccatgagaattattacaatgggaggttttgttgcagagccttttggtttatctttgttgtgaatgatgctttttgttgtatttattaatatcaaattcacttatgaatagacttgataatggaaacagatgagaaaaatcaagtgcatgtgtgtctttgactattctgtttctcatttgataaactaattattgacatgggagtcaaccagcacctttttgttgaatggtggaacctggtttcctttgaccatgaaattgtcttctggaaacatgggtcctgatgagagagaagatgctgcaagaggcttctgtccattgggctctcactctacctctcagggctgacattttaactgacccgcttcctggagtgtcttgtcttggaaaactacttcaaaggagatgttttgttaccttttaacatttttttaaatcacctctgctaaagttattttcgtgtgcagccaactttcaaatattaccagtttgggtgaaaggccaaattt

SEQ ID NO: 35429 - DNA, 1156 bp, Mus musculus
aaggcatggacagaaatgtcagacagtagatgttgaactgaggctgggacttcttaagaaccagactcccattttctgtatccttatttttcgtagggcgctgtctccattttttttttttttttttaatttttgggggtattggaggtgacagataatttttagtcttatatcctcatttggagaattactggtttagactccttttagagttttttatgcataattagaaacacactttttctttttttaaagcttgctcctcctattgtacccacaacaggatattgtaacccatgtacattttttttttcatcctttgccccagtccgttaccctgatgactctgatccctgatgcttttcttttacccctcaatatatgaagctgttatagaaaaatgaaagtcatatagttttatacagagtatttattatacatgagcataaataacgtgttcttatacgtcaattaggtgggtagagaatttaaaggggcaaagaaatgttactttgttcctgtttctaaatttgaattttattattttggcactttgaaaagatggactgggggctggagagactgctcagcagttaagagcactgactgctctttcagaggtccagagttcaaaccccagcaaccacatggtggctcacaaccatctgttatgagattggatgccctcttttggtgtagctgaagacagctacagtgtacttacatataataaataaatatttttttttaaaaaaaagaaaagttagactgtatatagatcaagtgtaaaacgtcatagtattgttaaagtgctatctttctctttttcagtttatcatgcaatctacttggaagaaatggttgcctcagaagttgctcgaaaacttgcctccgtgtttaatattcctttccaccaaattaaccaggtttacagacagggccccactggtatccacattcttgttagtgaccaggtaaatcaaacaggtagtagtcccctcctcctgccaacgggcactcatatcgtgtcgggttgtgagaaatgctgctggcctcttttacaatagtcatttttaaatacagccatgatcaaaatagtatcctagtagcagaaggaatacagttagggagagggcctgagctttccctggccttt

SEQ ID NO: 35430 - DNA, 1957 bp, Mus musculus
gggctccctgagcagagttacagggaatgtgtctgagggaagaggagctagaacagtgcagtcagttttaatactgtatctcttctaagcttagaagttttaacacccccctctttttttttttgcagctgaaaataatgatggtattcacataattttgaagtgataccttaaacggactgaactctatccagtaccaaataaagtcatgcttaaaagtgtgtgaagactgaatccaagaagtcttgggattggattttactgtgaaatgtttcatattgaaaacacaagatgaccttcctaaggagctgcaggagaggcaaatctcctcagtgtcactgccacagccccagcatcctcgtgagagagagagagagagagagagagcctgtgcgagcgagcgagcatgtcaggtgacattcgacccagcttctaccgtggtgggcacaagtacttgcttccctggcaagggccagtggacagaaccccccagagcagttgctgctgcttttcacactgtatgcagtttgaattgaatgtaaaactcaaccgtgggcatttacctttctgtgccagtttggcttttgttgcctgaaccttatgctggcctggggaggagatagagttgcctctgggggagctgctctgtactgggtgacacggccgtatgggtcaggtaagaggcttagctccttcctgaaggtggacatcagaggggtcctgctagacccgagccgagccgagccgagccgagcagatgagcagactgcactccctgtcagccattccgtgtgcgaggtcagtgtaagtcctaataggtaccgaggcttgggcgtttggcttgggcttccagttttagcattttagtttctggatttcacctttgaaacctccttgccttttaaactcatgtggtttccttttctcgtctccccaccccctacttgagcctccaggtgtgtatactcccttgtcttgtgcctactctgttcttaaacatgtctaaagcccttcccagacctcagaactagatgatggggaaacagtatcatgtctctgatattaaagggattttttttttaatgagacaaaattaccctggaaacactagatgtcataacaagacactaaaatgtatcataaaccttccccccgcccaaataccgagtttcagtacaatcatggctagatggtggctggtgggggctctgtactctgcatcgttcatgctttgtctgtagcaggtgtgcctgtgagtcacgcgtgcacacggccatcacctctcctctctctcacgacctctcgtgaggcctgtggcatatccgagtttttaaaaacttctttccattttaattctgtagcatctttgcccatttgcttagctgctggctgtgaatgcgcttgtctgacccttgttgttcaggtgggtaggaataattacattttaaatgaaatctcttccagaagacagactacttcaatgggtaaaggctttaacagcttgttttattcatactggggattaattacttgccacaaaacaaactgtctcgataattttcctcttgggtttggcagtgctgtagccttgcaggccctttaggagggagcgctcccatccgtccttccctttgctttgtgtgaccacatgctttctgtaccattcacttacttgggaaagaagtggacttatctcctaattgttttagaattttgcttgtctatttagctttcctttttggatctcatgatttatggaacaataaatgtcatttaatgctgtgtattattttgaattcattatcaggttttagaagtggggtgaaagtacttacaggctcctcagacttgaacttgtgctgagcagcacaaagtgctaggccgtctcagtgaaactatacctggcccatggcaccagcagtctgctactttggttataggatgtacagttcagtgt

SEQ ID NO: 35431 - DNA, 1191 bp, Mus musculus
tctagcaatgtcgatgcagaggcgaggggattattattaggttcggggctagcctgggctacaaagcaataccctgtcccaataaagcagaaacaaatatatattttttctattcaggatttttgtatgctgtcctaggttttcataaataagtcttccatatctcaattccttgctaaagcacacatgcacacatttcctcagttgctgtgttggtttttttgtttgtttgtttatgctgtgttggggatgggtctgagggtttcgggcacgccaagcaagcatggtaccaactgagctttagcccagaaaactcccttccccttaccccctcaagggccatgctagcatttatatatcatagaatactccttcctatctgcatacttcagtggctgttgggtatgtacacactcacacagtctttcttagtgtgtgctcattaaccctttcatgccttgaatgaaatccagtaccctgtgctgcttgctgttggcactcacatgagaagtctggtcacccgacagttctctctgtgtctggacaggaagcagttcagttctttaatgtgacgacgctccagaaggaactgtacgacttcgctcaggaacacctaatggatgacgatgaggtaagctctcgcgctctgcacagtgtgcccgagagaaaacatgactcgggtctctgctagagtcacttcaaggctgggtaccccctccaatgggaaacagaaggggccctcgaggacacagctgctgttggggttttaatggacgccagtgttctggtgtggaaaagcacagagctggaagcccaggctagaccgatgcttctcctgtgggggaaatgtgtttggagtatgcatcagattgtgtgtgtgtgtgtgtgtgtgtgtgtgtgtgagagagagacagagagagagagagagagagaacgggatggactgggggcgcttgtcccaggacagccctgtggagtcagtctctgcttcccccctttttgtgggtttcagggattgaattcaggccaccagacttacagggcaaccactttacccactgacccctccaccatgtttttacagtggagtctcttacagaacctggagtttatttatttggctagactgactgcagtgagctctcaggagcctcctttctctgtcctcttcctcagggttgaggtgacagg

SEQ ID NO: 35432 - DNA, 1282 bp, Mus musculus
tgttgccaattatccgttttgcttactctcctgtggttttcttctgctccccattccatccatctctgttctgtttgttctcttgttttgtgttgtttggagacagggtctcagggtgtagccctggaattcactgcatagaccaggctggcctacgaggccaggagagctgtctgactctccatgcccagttctttctctaatttcttgaggaagtgccactttatagttctatgtttgaggcaaagtctgaaaaggttcagtatactgtgcgggctacttctctttaagtctgtagtgttcctctcactcatgagtgcgtgtgtgtgtgtgtgtgtgtgtgtgtgtgtgtgtgtgtgtgtgtgtttagtactaatatggaggtcagaggacaggtcctcttcttcctgtgggtctctgggatcaaactcacattctgccaagcgcctttacttagctattattattattattattattattattattattagtcacgtgttggtctgtgtgtctgcatgtgggcctgtgcccatgaatgcagatgccgagggagctggaggatgggggcagcgatggcaggaggttgtgagtgcctgacgctgagccaccaaactcactgttgctccatctcctgcttcctatttttgtttttaaaacgatacctctgtctttttcccccacagaaggacaggattaagctaatcactggtgaggagagcgcaggagggttagggtccagacacaagtgcccgtcgctcttggtgtcctccattctgctgtcccctccctccccgtggcagtgtcctctctttagccaggtgtttcagatgtgaaggaaaaaaagtttttgacgcaagacacataaaacaagcaagatgagtaagtataggtgtgtggtagagcaggtatccacagatctgtcctggggccattttcgccgagaacttcagttgcttcactccaccagcctgttggaaggacatcctgaccacagcagcctctggactcccggccatctgaagtcactcttggcttgggccttaagtgtgcagagcccttcctccccctctttccatagccctgggtctctggtgaaacagctgagtttttccaccctggggctgaggtgcccctttcaggaactccgcgggcccctggggtgagttggcagggctcgtggggtgtgactagatacccactggattggaacttcccagcttcctcccagaaaacctggagacaaggccttgcttgaccatttaatttataatgaccctta

SEQ ID NO: 35433 - DNA, 1133 bp, Mus musculus
tactaggagctagtttcttgtctttccttttcttcttttgcattcttccttcctccctcccctccctccctccctccctccctttctatactcttctctcttctccactcctctcccttttcccttccttcccttctgcttcctcttctcttaaagaaattatttacacatatgtgtgtacctgtgtgtttatgtgtgccgtgtgtgtgcagtgtccatagaggccagcagagggcatcaggtcctctagagctggcgttctaggtggctgtgagctgcctaacatgggtgataggaactgacgggggggggggggagcctctggatgagcggtgaacgttctttttacccctaagcacctttctgaccctcatcccttcctcccacctcccctcctcctgcctcccattttctaataacctcatatgtatcaatggtgctgtggctggacatttaggttggatctgcttgggcccttcagtgttgagagtggattctccccgttcagcttggcagtgaaggtgagaaatgaccatctgtccgttagtccccacctctgctgctgtccttactgagaacccccccctcccggagcaaatagcacaatgctgttcatgcattgggtgagcaggaaggtctactgatgtccagtgacgtcatgtattatggctaccacaaaacagctgacaaagggaacttaaggagtgaagggtttatctagtctgacttactcaaaagtattacatttgttagtatgtgtatgtgtgtctgtgcatgtgcacatgcatgcatgtgtgtgcatgctacagagtacatgtggcgctcacagggcaactttccccaagtcagtcctttccaccatgcaagtcttggggaatgaagctcaggttgccaggcttggtggtcagtgtctttaccctgtgtgccgtctcaccaccggccctcttggctcacagttgaagggggtacagtccatcctggctggggagggagtgtggtgaggtacggtcatgctgcctgagtaatcagaaagccgagagggaacaggaagtagaaatggtctataaaacctcaaacctgccctcagtgagggtccctccagcaagagtcggtctgccttccaaatgttcctc

SEQ ID NO: 35434 - DNA, 1099 bp, Mus musculus
ccattctgccacaggagcatggagataatagatgtgcgctagccaccacatccatctttttatatgtgttccggcgtcgagcttggggtgtcggtcttgtgcagcttgctccttttcccgacaagtcatctccccctgttttgattggtagatttgagatatgcaaacgtttctctgatgtatatgtcttttcccacattgctgttaaccctgtgtacatccaattatgcgtaggcataagatttcagataagggattctctcaagagggcacagttggctttattgtgcatgcacgccagaccagttcagactggatctggggtatgtttccagagattggtaaggttgtgttggcatctgctgatctctggtcctcctttctaaacacacaggttgagaatgagtacgggtcctactttgcctgcgattacgactacctacgcttcctggtgcaccgcttccgctaccatctgggtaatgacgtcattctcttcaccaccgacggagcaagtgaaaaaatgctgaagtgtgggaccctgcaggacctgtacgccacagtggattttggaacaggtcggtgtgtgtaggtagcatctagaaaacagctattgcagatagagtgaggtgtctcagagtttcctctatcaggtgggctagcgagctttgcgtgactgtaacaaaatacctgagggagtcaactcctaaagagggaaggctctgctttagcccacagttgcggcttcaatccgccatctgtttgtcctgtaatagagagaacctttctgggagcatataatgaaatgagacccttttacctcatggcctgagaccctcaaagagggagagatgagactgccaccctctctttcagggacatgtgcccagtgacctaaagtctactgagctctgtccaccccaccccgctctgtttgagacaggattttttttgtagtttaggctggctgcttattcatggtctagccaaggatggcctgaagctctgggtccccttacttccatctcccaagggccggagttctagatgtgtgctacccccatcctcggcttctttgtactattcttccacttaacaagag

SEQ ID NO: 35435 - DNA, 1145 bp, Mus musculus
aaaacaaaacaaaacaacaatgatatatatatagagagatatagatatactaataatgttatatatatacatatatgtgtgtgtgtatacacacacacacacacacacacacacacatacgtatatatcaagcagtaaaatgcctgagccaagcatgttggtccatactagtaatcttagcatttataaggtggaatcaggaaggtttcaagttcaaggcaatcctgggctgtatcacaggcccttgttcctagaaaggagtctcagtcatcacaacacattcccagcagaggagtggcccctgagctgtgtccagccatcctcctcatttgggaagacagggattgtgggaacttgtcctgagcacatccagcctatccctgtacacctggtgacacttcggggcaggaaaggggacagatgagctgtgcacacagctccttttctctgatctcaccctccatcccctcggctttaactcacaggtcccccaaggaatccttgatcgaaacctcatgacagctctgaacatacgggggaaggctggagccacgctggacatcctggtggagaacatggggcgtgtgaactatggcagattcatcaatgacttcaaggtaggacacttggaggagggacgggcctgggcctgaaacactcacgcatctgactctgcttccatttatacagaaaaaaaatctttactttctatgtctaccaaggaatgcagtttattttccttatgtagaccaggcaggctggcctcgaactcagagatccacctgcctcttgtgttccaggtgctgggattaaaagcatgcaccaccatattagatctacacattaactaactttttaaatctgtttattctccttgttgttgttgaaggcagtctcaagtagcctaggctagccttgaactcaccatgactttgaattttcgatccttgagcctccaccccccaggtgctaggatcaccaatgtctgccaccatcctgtttacgcagtgctggacgttgagtccagagcctcttgtatcctgacagccgagtcacattctccagtccttaagtactgacagttgtatatgctataaatattatataacatattatatatatcaataactatattgatacttaag

SEQ ID NO: 35436 - DNA, 1378 bp, Mus musculus
acgtcaggcgacatggctgagctctgcctctgtggggcagagagcaaggaagactctcctgctgaagggtgtgggcagccatagcagagagggttggggtacagacaggcagttcctgggagccagggtggatctcagaatgtgctgaggtgtggcccaagactggtctgtagcttctgaatctgaggctccaaaattcgtttcttctgcagcaggaattggtatttggaagaagctctaccacctaacatgggatactgggatgctggactctatggggcatctgttgcctctctgatactagtgttcctcagctgacaacctctctctctctctccctctctctctctctcttcctctctctccctctctctctctctctctctctctctctctagggtcaagtatggatcaatggctttaacctcggccgatactggcccacaatgggcccacaaaagaccttgttcgtgccaaggaacatcctgaccacttcagccccaaacaacatcacagtgttggagctagagtttgcaccctgcagcgaggggaccccagagctgtgtacagtagagtttgttgacactccggtcatttcctgacctgacttgaccatcggtggccattttccaagccagtctggtcaagactcatggctgaacctctgagactgagccttggggagcacagctctactctggttacacggatcacctttgttgtgctagaatggaagctacatttctggaatgtgtgtaccctgctggtgactttgcagccccgccttgcctgacctcccaccctagtggccaccgggaaggctgaagggagtggacaccacaggaagacacaggttggagcaaaacttgaataatgtcctttatcctgatttgaaataatcacgtcatctttctgctgaataaaattggtttgcaagttgtgggggtcctgtcattaatatatcaggcaggtattaaactccagggtctgacttaaatctcaactagacctgagtgggctgcctgaagctacttcaccagcttgaggtacaaagtgggtagaagagagagctggtttgggtgagaagagggctttgtttttgatcctgctttgactatttctgaatctctgtgatatctgcttggtgagagatctccagttataaaccatctaaaagattaatagttgctcaaagtaggtagtatggtctctctatacaattgaatagaattctctctctctctctctctctctctctctctctctctctctctctcctctctctctctgtgtgtgtgtgtgtgttcatgttcatgtatgtatgaagttgcatgtatatgcatgtatgtatgcaggtcagaggcccatcttgggtgtc

SEQ ID NO: 35437 - DNA, 1145 bp, Mus musculus
gcctggcggtggatgggcaggctttttgttgagttttgcttttccgtctgctcctttctcagaaatcaagtttaagatgactatggaagtgtcaagaggaggactgtaggcccaattatgactcccgggcttgtgatatttcatcttccctctctgacttcctgtgtcttcacatatgatagtcactgtaaaaatcattactacttgtatacgtgtttattattaaattttatctttgtcaattccatacattacacaatgcattctggttacctgctcagtccttttttttttttttttttttgatttgtagtttactattgctttaaaaaaaaaaaaaagattatttgccgggcatggtggcacatgcctttaatcccagcactcgggaggcagaggcggatttctgagttcgaggccagcctggtctacaaagttccagggcagccagagctacacagagaaaccctgtctcaaaaaaagaaaaaaaaagatttatttatttttagtcaggtgtaatggcacacatctttaatcctacacttcagaagcagaggcaggcagatctctgaatttcagggcagctgaggctacaaacttcatgtctcctgccccagaaaaacaatgtttatttattctcacttgtatgtgtatgaggctttggcctacatatatgtaagtgcgccacatgtgtgcagtagccacagagacgaagagagtgtcaggtcccctagaaatggagctacagacacttgggtacagagagctggtggcaggtcctctgtaagagcagccagtgctcttgtctcttctgaccctgatgtttcatttgaaatcctccctgcaggaaggtctcctggttcttaaggagtggggatgcactgtgccaggctgcctgctggttacctctgggtagtagcagcttgcccatcccacaaggctgaaagctgccctgggtctcaagatcaactcatgctccccctggcagctcagtcatttccggttttgtttatatggatggaggttttgcctccatgtgtgttgctgcgtcgagcttgtgccatgtctaggagagggcagcagatcctctgaaaatggagttacctgacgaagtcaccttgtaagtcagactcacatcattaaat

SEQ ID NO: 35438 - DNA, 5401 bp, Mus musculus
gaacaaaagtacaacattgcctaagtcctacctcagcttaaattttttttttttttttttttttacagatgaatgtaattctcctctgtgcagggcttgagcctgtgaagtgataatttctatctacctcaactctttgcatttccctctctggcaagcctcttggctcacatcctcttccctcctgaaggcctaggaggcacaggacagcggtcctgcaaccttgagggcactggaagcatatggtggggtgcatgcattttgtagattgagccaaggaaacccaaaaactactaagtaaaaaagagaagtataagatgttggaaagataggatttaaaattcataattgtagtgtatttgtgttcttgagaatactgtgtttatgtggggttaggttgtgtgtggtttgctcttttcttttttatcgatgcaacagggcttttctctgtttacctcagtgtgtctgacatctcatccctaggagatatggctgtggcttgctagcctagaaaagcagaccattcatattttcgggtgtctcatctttgtatctggtaaagaagggtgggtgtgtgggagtgtgtgtgtgcacacgcgtgcatgtttgtgtttcaaagccatctttgcttgaggagaaaagctggacttgacacaagacatcccaagcaaatttcttcccagtttgctaagaaactcgatttagctcaggactctaggttgaaagtgttcgcaaaggttacgtgtctgtgtttttgttgtttgttataaagacttaggtataagaaaataagttaaccttgttctcagagagagaggggcttttcagatgtggaccagggtgccacagaagtggggggtgctggagaagtgaggcacccccacatcagggactgttcaggagggcgggggacctcgtctctatgtgtgagggtgtggtaggcaaagggatagctttgatttgagaagcacaatgttttttcctgctttggaagttcagggaatgtagaagattgtctgactggtgggagcacctcactccctaacccttggctcaggtctgtttctcaggaaccttccctaagtctgagtggaggcagacctcaaggttaacacaaagccccgttcctcccccaaaggcctttgaatgtaaaggatttacaaaccaaaccacccaacaggaagtgtaggacacagtatatgtctttttttttttttaattttattttatttaaaaaaagaaaaaaaaaaaagaaaaaaacctgtaccaaagaatagaaacttgggggcctgtggctcccatcccattgaagtctgatgtattgtaagccacagagtgggccttcttgacattcacctctgagaatgagggcccatcccggttctctggttctctgtattctcactactgagctcagaccagatttgaaagaggacagaagactgcccaacatagatctaaaacccagtttctgacccccattgcacggcaggaactccacagaggaagaggcggtggggacaggataagggctcagtcgaattgctttgggatgctcagtttgcctgtgtgagctacgacgttccttcacattcacatgacttgaatttcaggatttcggggtgatctgagtgtggcggcgggtgctggggggcggggggccgtctcagcagggagaatagtacacaatcaaggaatcccgaaggtagcttcaactgctgatctccatgtttctcgggatgtgaaagagggttacaagctccttttaaaatttaatagtgggtccttccccagtttatatatccctttagcctttattatgtcacttaagcgttaaactgatttttaaaaattttgtagaacaggacaacccaggaggcctcaccccgccccccccccgctcccccccccccccaatcttaaactgcctttaaacactcaatagaactagctttacattcttaatgacactaattgaacaaatgaatcttgacaaccttctcagaaacctgattttaattgtggctggggaaagccgattttcaatgctaaattgaagtcatgttcagtgttcctcctcacagctctcctgtggcaggaatattgactgactgactgttcagtgagaactttttttctggtgactaacaaaatacttgacattttacttaggatctgataactcggcccaggttcccatcttgtggttgggtcttgatcagtacatggatagaccagtgtgggcttagagcacagcagatgtgttcttagaggtctgtggctttctatatccagatcagtgtaagggctggcttctaaggaattgtgatcatagttggagaacttttgtttttaaaacaagtggcttattgtggccgcctgagattggactcctagccggtgggggaattggtgctaagcactttggagagtgtaccttgatatggactgatccatatcatgacaccagccatgtttggtgagcacctgcagccagttctgaggtacgacaggaaagagattcaggaaggagacaccgtgggtgctggctggccggaaaccttctgtcactgcggtgagcgactgacgggtagcggtccctggtcaggtggcaggggctggcaggaactggcaggagctggcaggagctggtgagggtgggtaccaggagattcccattggaagtgaagtttcttaagtttgagtattaaccacctggttgccacctgcctaacattccaaaactataatcatctgaaggtcatcaccaatctatcacttttgttcatgagaagtctccaaacctgtactccgttatggctggcaggtaactccttatcttggtttgagcctagtagtctaggctgttcccctagtgcactaaacttcctccaatcaatacccttgttaagtctaacttacctggggaagcacacaagggtaccctaaacagaactggacagtgttgggccatagaggctgccgggatgaagacactttggatggtccagagtgtctcggtgtagttaagccaaagcttaatcatttgagttgggaagtcttttaagcttgaagcagcacaattactgtcttgtctgtgtgtcttcttgggtttggaagattctaaggttgctgtgttctggtaggtattaaaaggaatgccaaagttctaggcttgttttccctgttgtttaagacgtgtgtgtgcgcgtgtgtgtgtgtctgtgtgtgtgtctgtgtgtgtaatatacacacacacgcagtggtgccaaaatgtatttatttagaacatctctcctagtgaggttctgacagtctggggctgtatgaaaatgatgctatcatgtgtgtacagttacataggactggggctttctctggcttcgtgtgagccagggtcacagggcaggacaccgcccctaaccacactgattttgtttagtatggattttctacctcaattttggcaaaaagttgtctacctcacgtcggcaccggatgggtcttaaaagggctagtattaatccagtggggagggtgtggatgtgggagaccctctctagatgcagggatgttcagggatgcaggattgatttcttagacaaacgtttgaccttgaataagagctgtctggtcagtgtcgtcgttcacccaagtagttctcagccagtctggctttccctgccacaaatcctgttccgcagacagcggtaggagctgcttctctgaccggatggagaaccttccaccattaaaggcctttaggtctctcttctcttcaagagaaagccgttttatctgttaggagcgtctgtaggcgtgcccttttagtgggaactctacaggtctagtgggaagcatgaggtatttgaagggaatgagagtctctgacttcatgattgtatttgaagctgtctgtgcccagcagaatctcccgtcacggcggtgtagcccgtctacagtgaccggtgacgtgtgtattgctttttgttttgatttgttcttcctaccaaaggcaacactttgacacttgttgttccccctctcctccctttgttcttgtttgttaaatacttgataaattgagaagcacattatcaggactgttaactttctccctgtttgtccctccccagtaaccttctggtctacctggatgagagagcgcatcctgcagaccacgggactaatcgggttttgggtttataaataaatgtcaccatgaagaaatacctcaataatgtctatttttaaaactggtgttacgggtcagcaatccagcctggacggctgtttttccatcatcatttaaccagtaatggttctaaatgtttgttttgtatctgcattggtcttagaccccttttaatgattgtattaactcaggagctcaggtcgtaccttacctatctcagagcacactggctgaatgttggcgcccctggcagcaacgcgtttacttgtgctgtaaccagctttggttcttggtgctcctagcagtctgtagctctcctttagagggagactgctcacatgtatgggtggggctctcttgtttttttagggtgataaatgtctttcccccttttcccttaacgtctgccggtgagggtgggtggtttagcgatgtttaactagcatgttacgtgtagtagttgtgggtgggagggttggttgttcggttttgttttaatggatcttgtttgatacagtccattagcgctctcatgcctggtcagccaaaaaagagaagcagcagctttaacttttatgtaactgtagaatacacggcccacttcggtctttttgtttaagagaagtgaatgcacaccgcagaggcattgcctgatgccaggatgactaagttaagtgtcttccgctggacaagctgattgaaggaacacaccgcctcccctggcagcagagccctcggtgtctctgccccttttgggattgtggtggcatttctcggagcttgtcacggcactgggtggctaaggggatttccccctaaacctcaaggcaaaagtgtattttttttttttttttattttatttttgcaagccccttcctccccttgttgggcttttacctttaaaaccttaaatgttactattgccagccgcaggcatgacgggcaacgagagcgggtgaagagccagtggaagagcgttccaaacctcctgtgagctaagcggcttctgaatgtatctctgtggtccacagagaaggctgggggagtagcaaggagatgctgtatcagctactgcagccttaaaacaaagccggtgtctctttggactttaaaagtgtccctatgcagcttattttatttttgtttaatcaaataaacagagggttgtcccatgaaaacttggtgtccgtgtgatttttttccat

SEQ ID NO: 35439 - DNA, 1144 bp, Mus musculus
ctttgaaaatgcctcagcagctcaggggactgccccttgacctggaactctggaattccaggcaagccttggccacatgaggtccggtctcaagacaaaaaacaaaaggcctgtgtagtgccctgtcttaagttattgtgtctccatagttctgcttcgtgacaacacgatttcgcttccacagatctcgtgcccagtgtcttctcttgtactgttaaaaagttaggattctctaaaaactgttttgccctgtcttctggttaactgtgtccctggccactgcctctgacctgaggcaaggagagctgcagtcacctgtcccacttcctagatctttgtatcttaaattccctcttcctccccctggtgttttgtttttaattgagacgggatcttcttcttttttctttttttgttcttttagagatttatttatttataccagaaaagggcatctgatcccattacgaggagttgtgagccgccatgtggttgctgggaattgaactcaggatctctggaagagcctaccctacagtgctcttaaccgctgagccatctctccaaccccaagacaggacctttctattgactcttgactattctggaacttgatttatagacctggctgacctcatcttcacagggatcctcctgtctctgctgtttaaggaggtgcttcaagtgggtggttaaataaggagatctcacgtgctttcggctaaggaagaggagagggataggagatttttgctcaggctaagcagaaaccccaggtgtagaccatggaggccaaatattagttggtgatcagtatccagtgttggtctggagatcgtgaggcatgctgggtagaggagcagggtaccaggtgggtgcctgcactgggatggaggcatattatgctaatggatacacctgcacaggaacaccccccccccccccccccaatgtgagcatgccccctaactgggctctgagtgcttcttccctgaggagccaacgtggggttggggcagctaaaagatgaggtcagctggctttcctgaagccatgactgctaaatctattgtttatttcccgcatgaaccacagaaaatgattgtcccccaggagcgaaggttggtgtggcccagtttttaca

SEQ ID NO: 35440 - DNA, 1205 bp, Mus musculus
agactggccgcctgatggagggagggctgggaagtactgtactgcgcgcccccccccccccccccccccccgtttttcgagacagggtttctctgtgtagtcctggctgtcctggaactcactttgtagaccaggttggcctcgaactcagaaatctgcctgcctctgcctcccgagtgctgggattaaagacgtgagccgccacgcccggctcaccgtactgcttcttgaccttgcttcacatacagcgtgaccacagaccgccaatcccagagcagagaaccatagaactttctagatctgttgagacacaggaactcctccctgcttaagccccctagactgtctctatgatctctgactctgtgtgtctgggttgtgatctgactcaggctggaatgggatatgtacggcacctgggtttgaggcatcggacatgcaggggaggacagtgggtaacgattgtgacagttctgcctgtcttgaggggggaggggtacacactgtttggaggaggactgggctgtctccactctgttcacacccgtctctctggtccacaggtcctgcatctctactgtgacacctgctctgtccccatctgcagagagtgcacgctgggccgccacggtggccacagcttcgcctacctccaggatgccctgcaggactctcgggcactcaccatccagctgctggctgatgcccagcagggccgccaggctctccaggtcagtcacctatctcattgactcagacctctcttgtggaaggtgggtaggcagacgaactgcctggactcatggactggagactaaagacaagaagggcttgacaccccggctactgaggtctctagggctcctagcagtgtccagaggatgctgcgagttactgggttactttgctggttgtttcagcttttccctgaagctagcaagcattggtttttgttgagacagtagagagcatggacacttcatcttctttagccgtttgggtatttggtgcacagattgactaattgaaggctgagtcctgaacacagggcatttgatgttccgtgtcttgcaactgtccctgggtcataagtccttgtaatttgaatgtttgttcttttatggttgggtagggacatgcatgaccgtttgagaactgaagcagctctcccacattgctatgcagcggtgtatattatgtatagt

SEQ ID NO: 35441 - DNA, 1207 bp, Mus musculus
gctgggtccttttctacctcaccctccgtgattaccagaaatggctgatgggtgtaccttccgtatgtgtggcctatgctcgtttgggcttcctccagttctctgctcatgtaatttggccaatttcttactctttttgagaattctattgtatttatctttacattgcgtggaggtcagaggacaatttgagggggctgtttttctccttccaccatgtgttgtcttgagggttgaactctggtcatccaggcttagcaacagacagactcgactccttcacctgttgagccatctccaagatctccaagacccaattaaaacagattttgggggaggtgggtttgtgtgtgtgtgtgtgtgtgtgtgtgtgtgtgttttgagacggggatttttctttgtagtcttgactggaactcactctgtagatagaccaggctggccttgaacttggagatccccctgcttctggctcccagagtactggaattaaaggcatcccttgatcaataaaataattttgatcaggagaacatgaacactactcccacccaatgagtgcgtcttaatggtggaagttgccatgccctggctgctgtgcaggaaggatgtctttacctggaagcctcctagtctcctggagaccagtgcctctccccccaccccctctattataaactcttgctgtttctgggccacaatgcaaatggccagggcacattgtttgctacagagcagatgcctgctgggaggctgatgcctcggggattgcctggaaaacctggaggtgaagtccatcccatcaaaagcattctcacgcaacaaccgccttgccggaggtgtttaggggacacaagcagagttatattctgggaacccttgcatccccagaatagagaaagacaattacccagcagcccttgggtattttgttggtaaaagtgctttatgcttatggtaaatacttttaaaaagttaatcaagtagccacactgggtagggggtagagaagcagaaaccagcttttgtgtgctgttacagaggtggccaggtaggacggggaaccaggagctccctttagtattgacatatttttctgcaggggcagtcagtgtgaggtcagttacctaggccgacagcagttttgttttgttttgttttttttactagaaaatgttgatctttgagcctcttgacaggaacgtaa

SEQ ID NO: 35442 - DNA, 1701 bp, Mus musculus
cgcggagcgtgtggggcgcgcgtgcgtacttggcacgcgtgcttccgcgggccgggggcccccgcacgaggcgcagctgcgcgcccgagccgaccgcgccgcgggggaggctgcgcctcggccgccacgcaggagctcctgccgccgcgtcatgcggcggggcggccggcggcgcgcgcggggacttggactgctgcgactcccggacgttttcccctccctccaggaggctcaattcatttagccggagggcaaggaaaaaaaaaaaacaacacaagcaagactcgttgggaccaaattggtttgcgccgcggggaccggattccacggcggactttgagacttgtgcgggcgctcgtttgctgaggagtagcagtgcaaacccgccctgccgaggtggcccaggggtcgcctccaccgcgtcctcgatgcgctctgctgagtgagccgcgcgccctcatcctcctcgccgcgcgccctctgccctccagcccgcctgcaaatggcttcgttcccggagaccgacttccagatctgcctgctgtgcaaggagatgtgcggctcgcccgcgccgctctcctccaactcgtccgcctcgtcgtcgtcctcgcagacttccacgtcgtcggcgggcggcggcggccccggggcggcggcgcggcgtcttcacgtcttgccctgcctgcacgccttctgccggccgtgcctcgaggcgcaccggctgcccgctcccggaggcgcgggccccgccgaggcgctgaagctgcgctgccccgtatgtgaccagaaggtggtcctggccgaggcggcgggcatggacgcgctgccatcctccgccttcctgctcagcaacctgctggacgccgtggtggccaccgccgaagagccgccgcccaagaacgggcgcgcgggcggcggccccgggggcgcgggcggccacagcaaccaccggcaccatgcgcaccacccggcccagcgcgccgccgctccagcgccgcagccgccgcccggcccggccgcctcccccgggtcgctgctgatgcgccggccgcacggctgcagctcctgcgacgagggcaacgccgcctcgtcgcgctgcctcgactgccaggaacacctgtgcgacaactgtgtccgcgcgcaccagcgcgtccgcctcaccaaggaccattacatcgagcgcggccctccggggcctgcggccgcctccgcggcacagcagctggggctcgggccgcccttcgcgggcgcgcccttctccattctctcggtgttcccggagcgcctcggcttctgccagcaccacgacgatgaggtgagtgcgcgtggggcgcgggcgagggcaaagggacttttattttattttacttttttgtgtgtgtgtggacttgtattatcgcctctcccaaacccccaagtttctcggagaaccaggatttgaggacggtttccttctctgcatgtccgaggagtcccaaaacacgagattccctccttttttgttttcatttgtttaattttagtggtgaggttcgaacccagagcttatgctacccaagtctgcccttgaatttcccttctttttttttttgcttttttttcccatttatttgtactcgtgtgtaggtcaggatcattttcaggagtcgcctttcctcactaagtgggacccggggacccaagtcaggtctttcaggtttt

SEQ ID NO: 35443 - DNA, 1200 bp, Mus musculus
agaaactctgtctcaagaaacaaaacaagacaaaacaaaaagacatcataagagaacctgcattctcacattattagggagactgtcactgagactgatccaactcccaggagacatggcagcttccatacactgctcatacaggtaaccttggtgtgtgtacaagtgacgggctttatcatgggaagtaaccatctgagagcttagtggtatttagtcagcatttcaaatacaaaatcaaaacatggatactgatccatggagacttggaggggctgagcaggtgagctgtaaactgcaaagaggtgaagtgtcttgtcagtgatggagcttggtatgtaccagccctctgatgctctctgaccccaggccctgtggccagcagggctttgatctgcagttagtgtgttagtcccattcaggttctcgtacggcaggtggtcgtggctgctgccttgcaggaagagacagatgaggtcagctctgttggggtctctctcaggtttgtttttggtctctgttctttgggttaatccagtggcagggccattgttaattgggaggcccaccgtgtctagaacaacagaacagtgacttggagagtcagaaagggctctgagctgatgtttccaaaatccccccacccgtgattctgaacagtcagcagccacgtgccattaagtctcaggaagttgttaccttgaagtctcttattcaaggctagagagagagagactggtcgatgcaaggaataacagcaaatgacctgtggttactagccctaagagaaaattgaattaaaaaaaaaaaatgtgcacacgtgtatgtgtgtaagttagaaaacaactcaaggttattaacttagttatttcctttacccctgatcatctcaacacctccttcccccaccccaaacaaaaataaagatgtaagtatccacaaagtgtattggtgctgcccacataaagccccacgtgcaggcattaccttccagaactgttagccgcctgtgtgggagaggcatcttaagagcgagtccagtctctggggaaggcatagtggtgcactaggaggcagaggtggcacaactctgggtgagatgcgcagcagtcctacgcatctgtgtccaccctcagccttccttccatgcatttcacattctgtcaatgaggtaggtgtctgcctcacagagcagccata

SEQ ID NO: 35444 - DNA, 1138 bp, Mus musculus
actgattccactgtgcaagagggaatggagacatggttttcaaacaattttcagtaatttttaagtatctgaaaatcacccatgtgaatcagacatgggtgattccatgtggtcccctcttgatgactaactcactcaggtggggtggcagtgaggttgcatcctgatacctttagcagagcctccacaactccaaaagcaaacacttgctcttgttaagttcctacttggtaagagacttaggtgttagaagatgtgctgttgtcctgcctcagatctattttcatgtatttgtaggatcagacaagggtgaaaatgaagcaatggaatcctgtaagtaagaagttttgtaaatccttaagtagcctggcctgcatcccaaagacttagaccctgcatctctgtgtcctgcgtgtatctgtcagcctgaggagtagtgctttgtcccaagtgctcagcgtggagcggtgctctctgtcctctgcacagccccttcatccgtatctacgctctctcctcagctggcaagcgcgcccctcagtgctaccccagttctgtgaactctgcccggactgtgatgctcttcaacctgggcagtgcctactgcctgaggagcgagtacgacaaggcccgaaagtgtctgcatcaggtgagagggcacggggagagggcagccctcatgcacaccagccatgagaggacctgggagtttatggagtttgtgacttttgattgaggtttatggtcagtttattaaacacctgaaatatttttccaggtttaaaatattcttgggagcatggtggggcacatttttaatcccagcatttgggaaacagagacaggtacatttctgagttcaaggctgagctgacctacaaagagttccaggctatccagagcctcctagtgagagcccgtgtgctgcctggtttgtattagctttatagaagctagactcatttagaaagaggggccctttaattggaaaaatgcctcatgagatctgactgtaggacattttcttatttactggttggtggtaggtgatgccatccctgggctggtggtcctgggttctataagacagcagactgagcaacccatgaggagcaagccagtaagcagcactcctcca

SEQ ID NO: 35445 - DNA, 1148 bp, Mus musculus
tctctctctctctctttctttctttctttctttttctttctttctttccttatcatatatacagtattctgcctgcatttatgcctacatgccagaagaggtcatcagatcacagtatagatggttataaaccaccacgtggttgctgggaattgaactcaggacctctggaagagcagttggtgctcctaacccctgagccacctctccagccgagaatcagtttttcatgtgcatataaaagaaaacaagtctaaagctccgctctacgcaggcgaaagccaggtaacagatagttgaggtagctaagagactctgtgctaaatcagactctcagaagcatcctgcaggctggggatgtagttcagttggtgaatgctttcttggcatttacaaagtcctggatttttatccccaaagctagccctggtcacacaggcctgtaaccacagcacagtgaaggtggagaccggagggtataaagaatagatagccgggtagtggtggcacacgccagtacttgggaggcagaggcaggctgatttctgagttcaagaccatcctggtctatagagtgagttccaggacagccaggactgtgcagagaaaccctgtctcaaaaacaaaaaaaaaagtcaggcttggtggttcccacctctgatcccagcagttcagaggtagagaaatacctggtttacacatagtaggttccaggacacccaggagtataaaatagagaaatactatctcaaaaaacaaagagaaatagaatcagggcctggctccttgttgaagggcacttgctatttttccagaggagacccaggttcaggtttagcactcacagtcagttggctcatggcattgttagctccaattccacaagttaatgggaggccatcttctggcttctatggacacagcacacacatggagcacatttatccacaaaaccattcatacatcttttaagatgtcaagatacatctttttagaaatactgatttcccccacttgggaagtgtttcacgattaactgatggggctggaggtgtggttttggtgcttcaaagcccacgctggggttggagagttttgtgaggacctgggtgggattcccagcactcatagttacccacaaccgcctg

SEQ ID NO: 35446 - DNA, 1237 bp, Mus musculus
atttttattcaaaagatcgtaaatggcaacattcttctcttggttcccaccctccaccccccaactccatgctaagaacaatgatgtcagcctttctatagaggaagcaagtctgggcagatgccagcttggaaactcccctgaaaacggagctgggggcatctgcaagtcaaaagctctgactccagtgtcacaacaggcaatgagggggcaatgctgattccctctggccatgccaactaaacccagtgagtgggaggggacggtgcaggccctggtgcccacagagaactctagcagacaaaagacccaggtggacactgttttcatgtttcctctgaagagacaaaaacatttttcctacttttttttttaacatgtatttattactgtatgtatgtacactgtagctgtcttcagacataccagaagagcgtcagatctcattacggatggtagtgagccaccatgtgggtgctgggaattgaactcaggacctgcggaagagcagtcagtgctcttaaccactgagccatctctccagcccttttcctacctttttgactatataaaaaaaccggccggtagtggtggcgcacgccggtaggatttgctgaaggaggcagaggcaggaggatcatgagttcgaggccagcctgggctacacatttttacgggctggagagatggctcagtggttaagagcactgactgctcttccagaggtcctgagttcaaatcccagcaaccacatggtggctcacaaccatctgtgatgggatccgatgccctattctggtgtatgaagacagctacagtgtactcatataaataagatatattaaaaaataccgtatgtctctttgacatacaacacttaggaaatatgaaaaggcaggtgtggtagcccatgcctgtaattccaacactcagtaggcagaagcagagagaatttggcaggtttgaggccagcctggtctacataaaaagctccaggccatccagggctatatcataagacccattaaataaatagatagatagatagataaacaaacaaataaataaatgtaaagaagagataagttacaatttgctcttgccatattttatcaattcataaataatatatacaaatacatttcagattttttaaatttaattatttatttatttatttatttatttattttgagacaggatcccgtgtaatctaagccagccttgaactctctat

SEQ ID NO: 35447 - DNA, 1572 bp, Mus musculus
gagagcgttggccagggctctggggaggactatctaacttttgttctttcttcttgaaatgcactgtaggccagaaacctgtgctttcagatgttcacgcagagctagacagaatcacacggaaacctgcttctgtttctcctacaacacctacatctcctacggaaggagaagcctcctgaagataccaaacaaagccatttgttcattcttctgggtaatgacagcttgcctctgccctgcccttccaagttggaactacgatggggccggaagcttttacaaacagacaaagtttatgtccttatgtccttttttttttttttttggtggctgcccatttttaaaagaggaactacacagaagaaagacaggtttttttttttttttggtttttcgagacaggatttctctgtatagccctggctgtcccagaactcactttgtagaccaggctggcctcaaactcagaaatcctcctgcctctgcctccggtgtgcgccaccaggaccggctaagaaagacaattttacattatgtagaataactgtttgcattgccattctgcaaaatgaagaaattttgatttttgaaaaaaaaaaaaatgtcaaactgtttaagactgcagtaggactaggcgatcctctttcccaggcggtaagccaacaggaacatttagggaagggcagaaaaatacgtacttttggcagttgactgactcagaagtctaagactattccaatcatttttaaagataccatgtttttctgaagaagactggtcagttgtcagatttcacacaccgaccaatagatgtgtatggcacctgaggtgtgctgagaaacccccataggctcacactccgtgatcccatgtgccaccatcaagtggaccagaactactggccaagatgctatgctcctttaatcaagaagaaagaaagcacaccacccgagggtgagagatgctgaggttatgagcacggaagggagaactggctttgcagttgtctatacatatatatatatgtgtgtgtatatatatggctctgccttaatatactccttttttgttcatgactttcaactgtaatcagttaataaagtatttattctctgcattcagggtcaaataacgtgttgccttttcttatattccagtttgacttgtcagcaaaggagtggaatttgttagaaatgtaaaatatttgacttaataggactactaagcattcattcacaggcaaatgaccaggtgaaattcactcacaggtttccttaatttgggagttcttgattatcccttctcccacggcatggagaattggttggtttggtttgttgagacaggatgccttatctctcgtgccgacctttaattcactgggtaatgtttccctaccaccccttcgggggttttctgcttttgtttgtttgtttttgagatagtctcagtagccaagactggccttgaactcctgatccttctgcctctatttccagccctgggattatggatgtggaccagtgtgcctggttttctgtggtgctaaagactgaactcagggctttg

SEQ ID NO: 35448 - DNA, 2399 bp, Mus musculus
agtgagggagctgatagtctatctaaagaccaaagagagaagagactgtcccgcaccgcgggtgtaatcacatggctaggcctttgcaactcggcagagatgtgagggtcggtgctgtgttcacccgtgcaaacagggttgatggcgtcaaactagagacttgtgggtctccctccgggcagatggtttctgctcaagcgagcacagctccgcaggcttctctgcagagcctaggctgggatctctggcccgccagattctccttcctgactttctctagaatggtcccgtgccctgccgtgtgccgtctgtgaaggccagtgctcgctcttcctctctgttctcttcccattgtcagccgtctccaggccatccagaggtgtgtcccttctcaccaggagtctgaggcagaggtgtcaggtccgtgttccctcccacaggcctctgcttgggtttctttctctccaggggagaggtcttgaagatgtaaacccctgaagccctgctagtgagtactgctggtggtgtggggaggccgcaggcctcctgggactctggaaggatcgcttgctgctggagggctgtcttagaaccactgggcgcccttccgacccgggggacccttcttcccttcttgccttcttcctagagcttgagcgagatccagcacgtccaggccttctgtgcactggccaaggtttcccaggctgggctttctctttggagtggtgcgatggatcgtgtttccggggattcactgtaaagtccccgtcctttccagtgtcttgcgtgcctggtgtgtggaaggagatggtttcagtttcctagtgaggctgtggcagttcttggaagtggatgaatctgggcacacagcttctgccctgtccctgcctcactgcctgatctgctgtcctcaaggtttacatactggtgatgtcaccatagctgctctggagatcatgaaactgatccttaacattgccttactggacatgccattccagagaggggacagtaggctcttgaaaccaagaatagagaagttcaaaagtaaccagtctattgcagacaattttagagttttatatcaagctgtgctgtaaatatcatttagacctattgagaattaacagcaaatctgagctactttagtgttaccaactattagtctgctgactgtttctataacaaaatacctgagacaatcaacttaaaaagaggaagggttggggaaaaggttaatcttggcttgcagttttgtaggctttggcccttagtcagacctgctgttttagacagcaacacatcacttggggagtttgttgtagatctggaagcaaggaaagaagggcggtggcttgaggtcctgaggtcacttaagggcacaccctctctgacctaagacctcactaggccccgcctctaaaggtttctgacctcaatagtgccttcctggagaactagtttctaactctcaggcccttggggacattgcatctcagtagtaggtgcctctctacctgtgtttggcttgttcatgattggcagacactctgcctggctctgcacagcagcggctcagcatcagcatccagctgcttgctgtgtgttagttgtctcacagctgagggctctgcctcggctacttcaggctttccggttaggaagataatttggtcacttgtgtctgtggccactcttagaattttctcttttgagggaacctgtgactggttggcttttgcattctatggagggagatggggttaaagactgtggcaacacacaccctccagaagagctgggaccagagactgtcagcacagaaaggacaatgtcttttttagtagctgtggcagacttgagttgctgtaatttatacaaattgtttagaatggtttttaagactaagaagggaaatatacttattgcacaagacttttataattactatacttaaattatgctctatgtggggactgagaagtgtatttctacgttgcttatatctgatcacttttgtatttgttgatttaaagcctgtgggtcttttttttaatcactcttaatatcaacttttataatcttttaaaataaatcctcttaattccagtgtttgtgccttcacagttgttcattaattacagacttatttagatgaggccctcacttgaggggttagctgtccccatgtctgtacgtgtccaatacacgggctgtcttctggagagtgggattcggacttaaacatcatgtttgtcggctgtggcagcacaggagtctccaatgccatcacttagggctgaagcaggaaggtcaccagcttaaagccaacctggtttacatagcagggaaaatactgtaagagctagctgtggtggaggcagatctgtgtaagt

SEQ ID NO: 35449 - DNA, 1336 bp, Mus musculus
ttatttttcaggggtgggatcctactcagttttagagttttggctctgctgagtgttttgttactaaatgtttctctattgaatgctcgcacattataattatcgttaaccctgatacacatccttgaagctttttacccttaaattttcttgaggggaggggtgggggctagccagtgtctacctgtgtagcccagactgcctttgagtttgtggcagttcttttgcctcagcttctcaaaattctaggtttacacgtgtgcaccaccacaatgatgcatgcatgctgtgttcattaaaatctgtaaaaacacgaggtttgtggtgcatgcttgtgatctcaactgtgggaggctgaagtgggcagaccctcaggtcaaggcaatcattttacaatcctatcaaacaaaaccacacacacacacacacacacacccacacacaatttggagcccatggcttctgagtgggttctattcccagaaagataacctaactctccatttctctcccaagatgcatctgcctgatgaggccacagcctctggaggaccctcgccatggctgtggactcttcaggcgacaaggcctgtgccttccctgctttgccaggatactgggctcctgggcatctacagcctcctttcacagtctgctgcagaggacatccctccgttctgggctgttagcaccactcaggtaccaaggactgctctgagcacagtagagagacttgtggatctgcctgcatagacacgcctttcttcataccctcaggaccgagaccacacagaggccgaagaccctaatttatctggcctgtcaatctggtcttgaagcgtctctaagtgaagagccagaagaaacactatgtggccatcctgtctcctgcccctatctctgcctttgtcactgtgggtgggggtgggggtggggaggtgcatagtttttaataaaatgtcaattgcagcaggtttccttattgcatgagatgtctctaacactaggcctttctatgccagcttgagtgtggactccttgctaaatgcccatcctcctagactggcttcaaactaaattatgtagctgaggttgacctagaactcctgatcctcttgcctctacctcccaagcactaagattagaagtgtgtgctaggacacccagttttgtgtggtgctggggatgaatttcctccatacatattaggcaaccaccctactaagctgacatcccatcccccagtcacacacacacacacacacacacacacacacacacacacacatacacacacacaagcttcccatcttacatagttttgggttggccttga

SEQ ID NO: 35450 - DNA, 1207 bp, Mus musculus
tgacttttgtcacctggcagagttcttcggtgcttcagctggatcatgccacatgccagtcaataataactcagtgtgcactcgctggtaaggacagtggctgagttactccctttgcagccggaagcagccgactgttattttagctaacatgcagcccaggcgccccctgcaggtaccttcaaacctccagccaattagcgtgggaataacctggattgttgcagcacatcgcagggacagctcagctggtttcccgtttgccccctcctcctgggtgcccgagcagacatgtgccaacatctccatatctgccacaggtcaccctgctgattgccttcatctgtgtacgaagctccgttccgatcgactatggtgcccacagcttcttcgaagtcgtcaccatgtgcgacctgataatgatcctcatcttttacctggtgcacctcttccgcttctaccgtgtgctcacctgcatcagctggcccctgtcggtaagagtgagacttggccccactatcagaatgcaggaattgggacgtggccacttgtttcttcttgtctgcccattccacatctctagcccccgaccgactctggtgcttccacagacatctctgcctgcttccccggggtttctcaagctcccttccagggtcagaggcccggggctcctctcagcatttatctgttgtgtgtggagagttgttgcaggactgagctggtgaggatggtaatgatctatgccactgggtgcacggttgggagagttgaatggtgacacttagtggctgaaacacactggcagaggctgagaagataaatcagaagggctctgtctcgaagacagtactgtgtaaaccaggctggccttgaactcagagagatcatgtgtgctatcacacctggcaaatgcacttaatttggtactgtgatctctacctgagcataaaggccctctgtcgattataacagagatctagtggattccttaggatccactatgtaccaaatcataccatccgcaaataccaacggctcacttcttcctggctagtctacatgccttccatctgattgccttgccttatacagaattagccaaacagagtggtcggatgttggatagaagtggcaggagcaggtgtcacggctttttctgggagcactgaagggaagcattgtatcttccctcctgaatatgagg

SEQ ID NO: 35451 - DNA, 1243 bp, Mus musculus
ttcaggcctggagatttttcagtgtctacacattaatggcttgtccacagatttcaaggtgccaagtagaatagtagccataattttaatcatgaatttggtgcctggcattctggaaaaggaacagcgactggctagtcggtcatgctttgaaatgcttctgtatttaattaatgttgacgatgactgtggaaagttctagaaggcagagagccccacaagtaggagatgtcatgtcccctggaagagctagctgatgctgtgctgggaaccacaaccagaggtgaaataacacctcctagaaaaggagggtgcaccaggccacagggctgaataggggaaaaggtgtggggtcccctatggtgccagtggttgggccacttaggtgccaacatgcccacagatttttgttttgtttttaaataatctagtgggtcccagagacgtcctgctccctcttgctttgctgggagcggcacccgggaacagagtagtccttcagattctggttggtagagaaggcctctctctctctgtctctccctgccctggtttcctgcctggcccaatgcatctgtttcctccctgccatctgcctaccgcctgtgcctctggccaacctccaccctggctgccccatctgacctgccagcagccgctttgccctgtcaccagcctggctgctcactggctggctgcagtccctgcatctctcacaggccagcaaaggcattctgggctctacagagcttggacccagctgggagcctgagggactcccagaagtgacagatcatgcctgctcaacttactccactccttgtggggtatctgtagctgctgaggcccagcctccaccagacagcaggtccccagctcatgctggcagttagcaaggctgagacctgagggtaagtgttttctggggctctgaaaggacagccatgagactcgggagaagtcctttcttatcacggagatggatgggaagacaggaagcaggggagatgagaacctgcagcaggacctcagggctttcattcccaccttcctgaacagctagctggaactcccatcttgcttaggaagaagcaaaacaaacgaaagcttttcaccacttcactgtagaaatgcggccgttaattgaagatgggctggtgagctgggtgctttctcctgtatccttgctaaactctcactgcctcaggaggttatatcccatgcccttgtttacggatgagta

SEQ ID NO: 35452 - DNA, 3489 bp, Mus musculus
cactctcacacactccaagaggcacagagcacaacctaacatgtccttcctacccctctaggtttcccctcttcactgcagtgtatcagatctgctatgaaggcaggcctgtcacgcagatgctgtcctgcctgcagagccacccagagcacatctgaaggagtcaggcagccatcaggaacagctctgctgtgcccactggaggaatccggggcttggcagtgggatcctgctgaactgtacttcgaatacatccaaattgttacagctttgtctctgtgccaggagaagcactcctccactggctaagatgtgtcgggtaacaactacagacacacacgcacatgagtgaatgtgtgtgagagtgtttgtgtgtgtgtatgtgtgtgtgtgtatatatacaagtgtgcacctttctcattctgtgagtgtttctctgaacccaaatcaggtgtctattgatcacattttaaatttcccctccagggcagcttgtgaagttagaactaactcagctaaatgttatggctgtgactcatttatatgcaagggaagggaggaactgggtttttttccctctgaaacagctatccagcattaaaaacgtctgcatatatgtgtgtttgaagaccaccacacttttaaacagcatctcagagccagcagcatgaactcctgggttgtggattgacggctaaacaatcaggtgttttaattagatactccacagacaggtgtcttcttgatacagagaccacattccttgcctctttcctcttcatttgctgctagaatgggctttcatacagacccagcaaggcagaggaggaacatccttgcagtggctggggacacttcattatgctcattgctaggtggactttttttttgcagctgtgtctcttcaggcttgtggaaggaaccctcaagggggccactgtcacttctcatgtaagaagccatagctgtacctggtcacctggggacatggggacattcctccatccctccaggatgggacctgcgaggatgtccctgggcctctctgacctgctgtttgtaggaatgatgtgcctttcctgagggccaggagggctacttgccttggagatttgtgtggcaaagagtgggaaagtcaccacccacgtggtgtccccagtcagcaggggcatttcactcagcaggatcccactgccaagccccagatacctggtgttcctccaggaatccagtgtttccacatgccttctatgcatttcggatgctcactacagcagagagccactgcactagagaatttacagcctttgctgaacaatgctctataagagacaagtgtcctggagtctcctggctaagccaggtggaccctggaatggccaagtaagtttggccatcccagctgcctgacttttcacactttcctagagtggggagggatcctggatgctaggaacccataaagctaatacgtcccaaacacattagactatgagagtcttgtttttcttaactagaatattaattaaaatttctagagaatactcctatagagtgaggtgaccctcactctccacaggaattcaggatgactaacttcctgtgagagttctatgtagcctgggctggccttgaatttgtcaccttcttgcctctgtctcctgagtggcctgggctttgcagttctggcctaacccctgagaaagctttcaggatgcagggtcaggcacagacaaggggatgtcgacctcagtgaaacgcacactatatggagtgagtgctttggatgctagaattagaacacaaatgattttatctttatttaaaaaccaggcgtcccacgggggtggaaagagcacacggaggtcattgtcctgtgctttagcctatgagagtttccacttcccctccctcctcctgggtttggttgcccccaccctactctacatcccttctataactgaaaatgattgtaaaataaatttttatgagaattttaaaaactgtccaagaagactttttggagcattataaagtcccacacctaaaacgcacagcaggctgaatatttcagttttcttaatgatgtcaatcaattttttcttgcctcctaagtcttttaaaaaacgaaactctgtacatatgtaacaaagagttactttttaagatatccaaagggctgagagctaccgtggtgtctacaaagtagcacaatgcagagttgttgacgtgttttgcatcctcgtgtacattcaccctctctctggccttgtacttccgcttcttccttccctaatgaatgaccttacttactgactgacatccccctgaagtcagctgatgtgcttataacccacccaggagggaaacaggtaaatttcttgtttgtgctctgaaggccagaggcattgctgtatgcgttacctgtttttgtaaccttgtaaccacctgctgattggtgtttcttggcgataggctcagagacacctagattagaaacttcacctgtgaatgtaaaactaagctcttgccttgctactctcctctccaccgcagttttggacaaatctttggaaacccacccctggggcagagcctgccttctggtgttttcatagctggcctaagaagggtgctgtggtgagatcgcagtgtctaaacagaattgtttctctgccacttctgactggctggcctcctacttccatatgtactgtatttgtttacggactgtaggtgggtgtatagtgtaaaggcttggtttaataaacacaacctctcagacctgttccatggagcctatttttcctttcttgtttttataaattattattggggtgtgctgtacaaaattgtgtctctgttcttacctacccaaggcattctttgattggctttaataaaaaatcagatggccgattagctgggcatgaagtggaaggtgggacttcctgggagggagaaaggaactctggaaagaaagaaggaggcacgaggggagacaaatatgattttggtactagaaagtagccacatggctggatagggctaggtggctgggttaacttagatgagctagttgagagtctgcccagctaaggcctaaagctttgaaatattaaaagtctctatggttatttggggaaaattggataaggaataattgccattgtattcatttccagcattaattaataaatacagaattttaatatttatattataacttgattgttgtattttataggtatggatgtatttggcctgcatgtatgtatgtatgtatgcacactatgagtgtgcctggtgcccacagaggttagaagagggcactgggtcccctggaactggagttacaggtggtttcaaacctaggtcctctggaagaacagcagccagtgctcttaactgctgggccatccctctaacctcgggttttctgagtcagggtttcatgcagctcaggctagtctcaagcttactccttag

SEQ ID NO: 35453 - DNA, 1116 bp, Mus musculus
gtgcttctagttactcagtcctataacttctttgtcctttctctctttcccctcctccctccttcagctcagaggaaatagccatgcaacatcatgacaggcctcttgtcttcccaacagatgctacaaaggttgcatctgtattggagaatattaaaaatgttgagatgaccctgaatagtcaggaaaggaacactgaatatacatctctgctcatgaaaggaggaagttacacacacatacacacacacacacacacacacacacacacacacatgcacacacatgtgcacatatgcacatgcttacaggcacactcatattttaggcttagttatctgcaaaatttaccaagtcagtgtaaagattctgttactaaggaagtgtttgctgtttgttctcatggaagctgatataaataggcaatggccatgttctctttcagaagttgattttataagatgatgtggctgaaaatatcccttacagatcctggagtccctctgtccctgctggtgcatctgtagactcatggtagttgaacatgttttaagttcagcttggatcgcggatctgatttccattgcctttgggtttgacttccatatgtcagtggcttgagaaggctctggatttgtcactcctgtgatgcctgggatcttgtccgtggtatcacaatgtccccttttgctgagtgtgtgctctgtcacttgtatgaccaggcttggagctctgcatgaatcgcattcggcgctgctgtgtggcctctgtccatccctctttgccagccaatttctgtgagtctccagtgagcctgtgctatttttagttggcttatatcacacagaattctcgagcgtgctggctttctggatgtgtctgtggcatatgtgcagatttccacagattgcatctctgtattttaggtttgcggtaactcggggaggtaagctgaagtgttgaggcttcccagggcttcagcctctgcactatttgatttggggctaatagtttgttctgggtaccactctctgagccgtggaacgaacagcggtgttcctgaccttgacccacaagatgttatgggcacaaaaatatctcgagaatttgtggaaa

SEQ ID NO: 35454 - DNA, 1175 bp, Mus musculus
ccactccttcctcccctccctctctatctctctccctccttcccctttccgtttttctctatttcctcctattattgagaccacatctttcgctggcctagaactcccggagtaggctggttggccagtgattcccaggaaccctcctccccgtcctccgcaatgtgctgggatcacacttgtgtgccacaaggcaagcacattttttgtttttgtttttgtttttttaagttggtttaggagatcaagctggggtcctcctcaggtttgtaaggtaagcaccccactgacagagctctgtctttagccttgagttttcttccctccatttatttccttgggctgggcatgcctactgggacagaggacaacccctgggattgactcttcccttccaccacgcaggccctggggaactgaactcagaccatcaagcacctttacccatgggagcgtctcatgggacgagtggctgcacattcctttctgtggtttgtcactcaggccactcagttcccagatgatggttgtccctgctgtaggagcgcctagctgggcttcagggggaagtttatgcttccccatcaactgatgccattcctctaggccccacattctcacgacttgctattgtaagtctgtttattgtagtcattccagtgtgaatgtgagacccgtctccttgcagcctcatttacatattgctagcatctaccacgtgtcccttctcatttgcttgtgcagcgtttcatgctcgtggtcatcccagttttgtttctgtcactgtgataatacaccttgacaaaatgcaacctagggaagccagagtttcctttagctccctgttctgatacattgtgacagagaagtggagacagcaggagcttaaaacatccacacagatcacagctgcagtcaagagcattgactgcctgcctgcttgacactcagccagcttccttaacatagtccaggaccgaagggcatggtggcgcccgcttataggctgagtctccttacctcagtggatgaaatcaagacagtctcctcctgacatgcctacaggctagctggatttataattaaaaccacccagcacaattaccaacttcactgggatgggtcacctacctccatatgtctaagggtgtttccagagaggcttatctgaggag

SEQ ID NO: 35455 - DNA, 2019 bp, Mus musculus
aactaattccatgtattcttctctctttctagactactaaaaggaagcgtggctacgttaaaaataagctagtgtttaagaaaggcaagaagacctctaagaagactgtttaaatgcgctgttctggcctcacttgcagcagtccttgagagaaccggtctttgccttctgctcatgtcctgtttcacagcaccaagggtacagaacatcgctgggccaagtcaatgtacaaaatgttctggcaatgcctcatttaaaattaaattggtttattgagaacagctgtttctgatgtgtaacgtgaagcaagacagagccctgctgtgagcagctggcagaagattttttttttttaattattggtacatattacccttcaaatctgagaatttggactaattgcaccaaagaaccctctaatttggtccctggcacatgcgtacctgtcaactttttttcttttacaagacctgcattttatttgaactacccaaatagcaatatgtaagacagaaatgcagatgtgatgagagcttcttgaccagtaaacaaactagcccaggtctgagagagacgtgctaaaggagagtctacgtctgggaactctatttattttcctgtttctccggtgtgaagaatgtttcatcaaatgtccactttgtcgctcactgccgctgtaagcagccgctgctgacggtgggcctccctccgcgtagttagctgactagatgtttgtgttcaggcatccggatgcactgcggttagcgggcatcctcaccaggtactcacagagcagattccatgcattcttcattcaagggctaaatttctctcctttgggaatcatggcaagcgcacacagaacgttgctggccaggatggctgttacctcagtactgaggtcggctccatgttcccacgcagaagattaagggaaagcccttacggtggacaggcatgcagagttcatttctgtgactctacacagtgacaaaggatttgtaaactttgcctggattttcctcattttataccagttttgttcatcacgatggtttctgttgaccgcttcatgtttttataccttaagcatttgatgaaacactctctagtgctctctaggcgtttcttacttttattacaaatgtgacaattgtcaaaagatgcactaaaatataaatggagattgagcctgttcattttccagcttataggcaactttatacagacttgaaatctttatccagttgtttagtaaagtgagagagaggtttcctgccacaggagaacttttacacaacaccccactgctttagtgggacagttgagagcagtgtgtcccttttatgaagaacccgtcatttacagcgctccgggagagagaatgttactgcagatcccttttccacggtgtagatactctgatttatagaattcattcttgatccagatgatggttctttcacagaccaataaaaaaaaaaaagtataactaaatctggatttctgataccttgtcatttgggggattttatcttactttgctttacagttccatgcagagaagttatgaccatgagggaaataaagcttattcaatttgtgtcacgccttgtctcttgcagaccttgtgtttgaaagaagtgcagagttctaaccccagactcccctcttctcaccttagaaaggtctcagccagtgtgtggaaagtaagtgcgttcataacgcagttttaaattccacctttttactcagaataagcacacctcattatgactttggggtcagaagaaaaggcagccaggctgtgagggcagccattctgcacgctcagagactgcatagcccagcattgagtgcagttttcacaccattcccgcaccttcctcgggtttagggagcaagtttggttcaaggcttggtgtcagtgaagcacacagtatgagggtttggatctcacagtgctggagtggggaagtgacaagttggcggtttcaccacactcaagtgtcagctgct

SEQ ID NO: 35456 - DNA, 1175 bp, Mus musculus
tttctgaagcttatagcctttggtctgaggctgtcaggcttctttagagcgccggctgctcaggcctgattgtcctttccagtgctacctgacagatatccgtccgttgtgttcttcttttccgtgttggctttaaagaaggtttaaagccagacgttggtgctggctttctgaggctgttttggttccgtaaacttagagtgcctaatgataaatgcacacattcattgtcacctgtcagctatggatattataatgtatggagctataatttttttatatctgtaataattaaatttgaatgatagtacatttctctaaattatttttatttagtcaacaggactaaataatttaaataggactattggtcaatattgataatttagaaacagttgctttgtgagatgccaactttcagatgtattctgtgctgtggtgatgaacatgtggtttcccgggacatttttctgtcggtgttgaaagagaacctgtctttgcagtcgctctgtatgcgatcagtgctgtctactttgccggagtgatggtgcggctgatgctgactctgaccccggtcgtctgcatgctgtcggccatcgccttctccaatgtttttgagcactatttgggggatgacatgaaaagggaaaacccacctgtggaggacagcagtgatgaggatgacaaaagaaacccaggaaacttgtatgacaaggtgagggctgtgctgtctccatcttcccagcaccagaagagtccccagatgtagaagagtgccgagatgcgagtacctgaagctgggccttctgcagtttctctccattgcttcctcctgagctgagccttctgtagtttctctccattgcttccttcaaagctgaaaccctagttgctctttgagctcagagtaaacagaattagtgcttaggtatgttagcacctttcattttccgagagcacggctcatcagatttcccgatgtgcaccagtgcttgcacttgtccttagtctgcgtttgctgcgaccttgtgtggttctacctctgtgtattagatggtaacttggtattcaaaagaagtgtttggttaaacacctgtttgttaacataatgaggaatttaacctgcataacaggacaaagcctgtgttggacacaattataggaaagacttagga

SEQ ID NO: 35457 - DNA, 1099 bp, Mus musculus
tctgaagacagctacaatgtacttacatataataaataaataaataaatctttaaaaaaaaaataaataaataaatgactaagacagttctcagaactgagaaagataattaataaagatgattgcatattcttattttaatattttaaatattaaatattaaaaaatagaatatcttattcttggtttatattctctctgttcttttaagtgtatttcttataaatttgatctttgtatctattacaaaaagattttattttgtatcatgtaaaaattttccgttcactcttaactacaaatgatgtatactaatacaaatggaagaagttgtgtgttttgtgtgtgtgtatgtgtccccactttgttcactatgtaactaaattccctttttcccccctctctaggtttacccagggttgatgataacagctggccttattcattggattttaaatacattgaacataacagttcacataagagatgtgtgtgtattccttgcaccaacttttagcggccttacatccatatctacgttcctgctaactagagaactgtggaaccaaggagcaggacttctagctgcttgcttcattgctatcgtaccagggtacatatctcggtcagtggcgggatcctttgataatgaaggcattgccatttttgcgcttcagttcacttactacttatgggtaagtaccaggtaatgttagccgccttaaatgctggtgaccttctgccctaaggctttagggcacacatgcgttctttaccaataaagtttcacacagatctgttactactcatagtacatttaacaaaagttaccatttaaaaagcatacaagccaagtatatcaataactgtattaatatgtctatataaattttaattttcaccaccttattgtatctactttataatcatagcttaaaaaaaaaaaagctaatcccagcacttgggaggcagaggcagacagatttctgagtttgaggacagccagggctacaccgagaaaccctgtctcggagaaaaggaaaaaaaaaaagctaccaggagcagcctgtcaactatgcacaccttttatgtgaacact

SEQ ID NO: 35458 - DNA, 1616 bp, Mus musculus
atggatcacaggtgagacttggtactgtgtgatgagaccagggtctctgaggacagagcagaagaggctgttggtaaaggtgtagcccctgttttagtagaagggtgaatggggtcatgttgagacactgaggcttggcaacatatggcaagatcagaattcctatgctgactaattttatgtcaactttgatgcaagcttaaatcatctgagaggaggtaattgcaattggaaaatgcctctataagatcaggctgtgacttcttcttttcaggaaaacaccaaatggcagatgacgccggtgcagccggagggcctggaggacccgggggcccaggattaggaggccgcggcggcttccgcggaggattcggcagcggtcttaggggccgtggtcgtggccgaggctgtggccgtggtcgaggccgcggggctcgtggaggtaaagctgaagacaaggagtggatccccgtcactaagctgggcggcctggttaaggacatgaagatcaagtccttggaggagatctacctgttctccctgcctactaaggagtctgagatcattgacttcttcctgggtgcgtccctaaaggatgaagttctgaaaatcatgccagtgcagaagcagactcgggctggccagcggaccaggttcaagactttcgtcgctattggggactacaatggtcacgttggtcttggtgttaagtgctccaaggaggttgccactgccatccgaggggccatcatcttggccaagctttccatcgtccctgtgcggagaggctactgggggaacaagattggcaagccccacactgttccatgcaaggtgacaggccgctgtggctctgtgctggtgcgtctcatccctgccccaagaggcactggcattgtctctgctcctgtgcccaagaagctcctgatgatggccggtatagatgactgctacacttcagccagaggctgcactgccaccctgggcacctttgctaaggccatctttgatgccatctccaagacttacagctacctgacccccgacctctggaaagagactgtcttcaccaagtctccttatcaggaattcacggatcatcttgtgaaaacccacaccagagtctctgttcggaggacccaggctccagctgtggctaccacataagggtttttatatgagaaaaataaaataattaagtctgctgataaaaaaaaaatcaggctgtgagcaagcatgttagagcattttcttaattagtgattgatggggagggacaagtccattatgggtggtaccatctctgggatagtggtcctgggctctataagaaagcatgtgaacaaagccagtaagcaacactcatctatggcctctgcaccagcttctgtcttcaggctcctaccctgttcctgtcttaattcccttccatgatgaacaatgatgtgaaccttttcctcctaagttgcttttggtcatggtgtttcatcacagcaatagtaacactagctacaacaggccctggaggctgttggtaaaggtgcagcccagttgcagagaccctgatattttggagctcccagtcccatagaacaattattaagaacatcagccac

SEQ ID NO: 35459 - DNA, 1167 bp, Mus musculus
ttcttgtgggttcatctatagtgaaatacctatttgctatcttttattcattttctaggttggctcgcctgtataatgtttcggttcaagtagtaagagttctttatagctcgcagttgaaaatcccttgtcaaatatgtagtctgcaaatatctcccctcccctgcctatagtttgcctttttaccctctcaacaggattttcacagagtgcaaatttttcattttattaggtcgtaggatagttaatcttcttgtcaacttgactagatttagagtcacctcggacacgcggctaggcatgtctgtgaaggtgttttcagagatgtgtaagacagaaggctaaccttgagcgtaggggcaagcatcttatatgctgggtcccagactaaagaaaaagtgaaaagccagaccgcagtgaacaccagcagccaacttgctctcactgcatgtgcagaaacagctgtgacacaaaatgaggtctatggccgtgccaccctgatcgcgccggatcccgaatgacctcggaagctaagctgggtcaggcttggttagtacttggatgggaaaccgcctgggaatgtcgggtgctgtcagctttaaagaaagaaagaaaaaagaaaggcgaaatgaggagaggcaggtgctacacacggcctgtgcaggggcatgcatctcttctggggaccttttgcctctgctcactggcccactctcattctcccaactaccttttctttcttaataaactgtgtctatttttatttctaacaatgtgttcctggtgcaatccttcatcctggaccacaagagcctcaaacgtggtgccctccgaagtcagacttgcagcctggctctaagcaaaaccaccctttcttcttctcttcttcgcgtctttttcagataccggcagaagcctaagccagtttcccctaacactctggcctgtcactctttcttgatagacaacccttggccctaacccccaccgccgcgctccgcctccctaacgcaagagggcgtgatttttttctcttccttttccctatctccctcttcccggaagcttccaaggtttgcagcttacttgtcctatcccaagtcctttgtttttatcaaggatgtcgggccacactgtcaaatgaggtataatgacactgggctgttt

SEQ ID NO: 35460 - DNA, 1212 bp, Mus musculus
agcaagccatggggagcaagccagttagcagcacccctccatggcctctgcatcagctccagcctccagtgagtaactagcctcacatgaccttcaggtgtaagccaaataaactatcctccctaaattgcttttggttaagtttttttttcttcttcttcttcttctttgtttttgtcatagcagaattcagtgtactctaggaatgaattagagggaggaggattagaaattcatggtcatccttgactacatagcaagtttgaggctcgtttgatatacatgagagcctgtatcacaatcatttaaattaaattaaactaaactaaattaaaattttcttagtaggtgaaacacaagatgagtatgcattcctcatcattccccagagatgaccactgtcattaggtctcctgtgtatggcacattcagatattttctaagtgtatttaaacacaagtgccctcctccagatgcacacatacaaggtgtgtagaacactgctagaccaggtgtctcagcctgtttcaccaccagctgtgaggctgacatgcattattgaactgtccactccccattttaactcccccattccctcctttgagatgctaggatgattctagtactcctgtcaaagggatgctgtgaggacttgttcataggaaccccaggtagggatcttattaaaggagcaagaggtatctcaagtgggtctccccataaactcatccatttaaatctttggtttcggttggtggagcagtctggagaggattggcaagagtggcctgctggagaaggtgtgtgctggactttgaggttccaaaaagccatgccatccccagtcagcttttactgccttgtgccagttgagcaagatgtgaactctcagctcttgtactggtatcagccctgtctgccaaacgccatgctccccattgcgttaatcatggcctctaaccatctggcactgatgccaaattaaaagtcttcttttataagctgctgtggtcatagtgtcttatgatagcagttgaagagtaaggaagacagagtagttaggagctgggaagatgctgggtggttaagagcacttactgttcttgatctgagtttgttcccagcacccagatgagccagttcaaaaccacctataattctagcatcaaggaatccactgcccctttctggcctccacaggcattgcactca

SEQ ID NO: 35461 - DNA, 3366 bp, Mus musculus
ttatgttgcgtcaattaaacacaccagcccaacaactcaggacatgaagggtttatttggcaacttcacaactgcagtccattatttctggggagtccagtcaagaactcaagttgctgatcacaccatatccacagtcaagagcggagaggcatgagtgcaccatgctgcatctggctctctcctgtctcattcagctcaggagcctctgcctagggagtgacgccacccgcaaagggctgggtcttcccgcgtcaattaaaaatgaagacaattccccacacgcatgcccacagacaaacctaatctgggcagttccacaaatgagactgtcttcttggctgctcctaggttgtgtcaagttgacagttaaaactaaggaggactccgtctttcttgattgactaaccagggtggaccagaaaaacgtgatactaagcgattaagtactacttggctcttcacactttggatgtcctagaagggggtcagacacccaaccacacagtctgcattgactccctcgagtgtgagtcaactaagagtcacctctgtttcacagttcaaggatctctgagaactctgaagaccccacgattatccatagtgagggatgttgagtcccagggctcagaatgtcggcagctctagacaaacattcagttctctgtttacagtgcgtgtggatgccccttcactggccttgaagtgcagaggcaggtccagcttacacaggttctacatggtcctgatgaagaagttatcacagcatggtaggcacccacagattatctctctccagcgctaacaacacccccaatcccccttcttccctcttctttatctcctgtgtctccactgttgaagagccagggagactccagtgtcatggactgggtgttaatatgtagcttcttggtgatcctgcatattgaaatccctccttaaagagatgataaattctaaagtgagaaaggatgccaagctggcctacataaagcaggagcttaagggaagggcaggagatgtcaccagagataacctgcaacttgtttaaccacagctgtatgctcagggtcttctggcatctccatgagcgactaactctgccttctttggtacctcttaagggctatttccagtacaaaatgaccattctaacacctagctagccctcagcccacccactacccaagcatgtacaaacaagatgtactatttctgtatccacaggcttgcctcccttctctccctgctttttaaatcctgctctggtctctggcctttggcttcatctttaatccaactcctcaaacatgagaagcctttatatgttcaataaagtagcaataagtagcatggagcccacgcacagaaaagctgcattattctttgatggtccctcctcctagggaggcagggaaacttctgtggagtgatatcttgtagacaactgtgacagaggctgctagctgttcccgatatcctcagtgtcccctcacatactcggtcaattctgtttcttaggcacaggagcttgtgtagaaagactttccctctaccctctgagcgcttgatacccaagtgcatgaggtgactgctaaaagacagattggcagctgagacagaactcatggctcatggttgtcacagggatggaagtcaatacctataaaaccagagggatttagaaactctaaaaccttgtcacttaggcaggggtggtggcacacatctttaatcatcccagcatttgggaggcggaggtaggccgaccattgagtctgaggccactctggtctacagagtgaattccaggacaaccaaggctacacagagaaaccctgtcccaaggaaccaaaagaaactttcatatttgtgtgtgtatgtatgtgtagtatgtatatatgcatgtatatgtatatgatatgtaagcatgtgtgatgtgaggaggagtggtttacaaatgtgtgtgtgaagctatgtgtatgtggcttgtatatgtgtggatggatatggatatgtgattatgtatgatttcatatgtgtgtgtgtacatgcacatatgtatgtatttgggaaatgggtgggtggtatggtatttatatgtgtgtgctaaagggggaatgtatgtatgcatgcatatatatgtgcctatttttttgtgtagtgtgcatatgtatgtattttgtatatgtgtgtggtatgtatgtgtgcagtgtgtgtgaggcagtgtatgtgaaacagcatgcagtgtaaagcagtgagcagtatatgtgaggtggtatacagtgtgtgaggcagtgtgcagtgtgtgtgaggcagtatgcagtgtgtgtgaggcagtgggcagtgtgtgtgaggcagtgtgcagtatgtgtgaggcagtgtgcagtgtgaggcagtgtacagtgtgtgtccctatgcagtgtaaggcagtatgcagtatgtgtgaggcagtgtgcagtgtaaagcagtgtgcagggtatatgacactgtgccatgtgcagtgtgaggcagtgtacagtgtgtgtccctatgcagtgtaaggcagtgtgcagtgtgtgaggcagtgttcagtgtgagtcagtgtacaatgtgtgagacagtgtgcagtgtgtgaggcaatgtgcagtgtgaggcagtgtgcagtgtgtgaggccctgtgcagtgtgaggcagtgaatttgggtcccttttccaagcatctgtgcttgggtagaagaaacagggacaggccgtccgtccctgtacccactgttgtcagtacatcagagcagagggcttcctgaacacctatacccatctgtaagatctttaaaaatcctgggagaagattttccaccacatagctgtgggcctcatgcctacctataggctgaggaacacagtgttgataggaccagctgtctccacaggagctatctggtcagccttcagagaaaagaattcggagggggtctgttcctgcaaaggtgagagaggccttgggcagataaaagactacaagtttccatggggggcttttaagcttctgaggcgggtacttcctgtttgcctggcatagcccttctgtggttgctgcggaaggtgggctaggctaattgccaatttgtgtgtgaagtaggaaaggctgggcttctttcatcttgaacttttatttcttatgtgtgctgccctgataaatctgcttatcatggctttctctggatgggtcctacagccttcatggtctcctgtgtccctgttgaaagtcttattcacacacttgtgtgcacaccttgattataaacaattttattttttacttctctgcctttggcttacttcaaacccattgactccaccaccaggatgtataaaacaa

SEQ ID NO: 35462 - DNA, 1185 bp, Mus musculus
ctcacacttcagcctggatgcccacacttgaggcacaatgtgtaataaaggatctaacaagtgcgtgggtgggtgggactccacagcagccctgtagggtcagcctgataaacatgcttccttttgtacagatgggcagactgaagggcagcaacttactgaaggcactgtactgccaggcgatggcccgagaatcagagcccaattctctgactccaggtctagactttttacagaaattactagtgtttttcatttttcagaaaacagtgatttgcgtgacttatttggaatgcacattgcatttgtttgtgtcttttccagacctgtgctgatgacagggcagtaggtgtctgagtgtgtatttaactcatgctctgttggcttctgttacagtcgggtgacacacagacttttgcgcagaagctccagctccgagtaccttccatggagtctctgtttcgaagtcccataaaggaatccctgtttcggtcttctaaagagcctttggtccggacgtcctccagagagtccttgaaccagcttgacctggactgttctgctgcggcctttgaccccccttctgatatggagagcgaggctgaagacgcaccatggaactcagacggtctcagcagagagcagctgcttcagcggctgcgcagaatggagcgaagcctaagtagctacagagggaagtactccgaggtaggagcgcggtgggtgttggcatacacaaaacgcgccccttggtcgtgtccatagcgctgcattgttcttaccctgaggctggccctggccctggtcactgagggtggatagctggtggcagacctagctcaggtctttctgtggtccacatcccttgcagcagattggcattttggttttcacgttctctgctgtgtctgtggacacctaggtcaaaggtcagtctttgttttctgtgttccccatgcgactcatctctgactagagtaactttagaagtcagaccgacttctcagacagtcatggttacgtagtctgatgtcctcagcgatttggctcattctcattgtaccaatatgtaaatttaaaatttttattttctttcatgtgtctgtatgtgcatgcatgaatacatgccataacacatgggaggagaggctagagaaagtctcgtgggagctggttctctcattc

SEQ ID NO: 35463 - DNA, 1195 bp, Mus musculus
gtatatgcacttatatgtgtatatacacttatgtgtatatgaataataaaattttaaaagcttttaagtatttgcctttgggggtagaaaactgagattttttttcccctcaaaattgttataaaagtaataaaatactattataaacctaaaagcatagagtgtggagatccatcttcctaccaagcttgctatcattatttgttttgtggtttattttctttttgactatcccattagaattttttgactagagatactgagatcattatgggatggtaaatagaggaagtgcagagctgagtgtgttcatgactgcattggtgactgagcacagcagattgtcgcccttttcttatgtttggtctgctatgtgaggcattcaaagaacagcctttagataggccctgcagtcttttatcatcactagtaaacaagtatgctgttagtaaaatacacccaattttcattaacagagaattcttgaattggaaacctctttggaaaaaagtttacaagaaagcaaaacacagtcagagcatctggctgttcatctggaagctgagaagaataagcacaataaagaactcacagccctggctgagcagcataggacagaagtggagggcctccagcagcagcaggacagcctgtggactgagagactccaaagcctctctcagcagcatcaggctgctgtggaggagctcagagagaagtatcagcaagagaaagatgcactactgaaggagaaggagagtctcttccaggcccacatacaagacatgaatgaaaagaccttggagaagcttgacaagaagcaaatggaactggaatctgtctcttctgagctgtcagaagcactgagagctcgggaccagcttgcagaggagctttctgtcctaagaggtgatgcagataaaatgaaacaggctttagaggccgagctggaggagcagcggcgtcaccaccagcgtgaggttggcagcatcagtgagcaacaagaactaaccgtccgcagagctgagaaggcactgaaagatgagctcagtcggctgggggctctgctggacgagagggacgagcacctgagagagcggcaggcccgggtgcaggacctggaagctcatcttcagaagtctgccggggagctccagcaggccttggccaaactagatctcttgcactctgagca

SEQ ID NO: 35464 - DNA, 1330 bp, Mus musculus
attaagcagaaagcaaaagaaatgcaagaaacaaagaaaaagttgttggatcaggaagccaaacttaaaaaagagcttgaaaatactgtcctagagcttagtcagaaagagaagcagttcaatgcgcagatcctggaaatggcacaggctaactcagctggaatcagcgacacggtgtcgagactggaggagaaccagaggcagcagatagaaagcctgaccggggctcatcagcgaaaacttgatgatgtcatagaggcctgggaaaagaagctgagtcagcaagctgcagagctccgggacaagcatgcagagcagatggaggagaaggagcaggggctgggagagctgaggcagaaggtccgcatagtccagtctgaaaaagaggagctgactaaggaggtggcgcgattgaaagaggcggtcagtgggcaggacgtggcactagctggcctgcagggacagctggagcagaagtctgctgtcatcgtttccctttcggagcgtgaatctcagctgcagtcacaagtggaaaagctggaagctgatttgggttgttctctgagtgaaaagctttcccttcaagaagagctggctgagctgaaactgctggcagacaagagtcagctgagggtctccgagctgacgggccaggtgcaggctgcggagaaggagctccagagctgtaagtctctgcatgagctcagcaagaagagcctggaggacaagagcttgaacctcaaaagcttgcttgaggagctagcatctcagctagacagtcgctgtgagagaaccaaagctctgttagaagccaagacgaacgaactagtgtgcaccagccgtgacaaagccgacgctattctcgctaggctgtcccaatgccagcgccacacagccacagttggggaggcgctgctcaggagaatgggccaggtttctgagttagaagcacaacttacacagctgacagaggagcagcgcacactaaagagctcttttcagcaggttaccaatcagctggaagagaaagagaagcagattaagaccatgaaggctgacattgaaggtcttctcacagaaaaagaagccttacagcaagaaggaggccagcagcggcaggcggcctctgagaaggagtcctgcatcacacagctgaagaaggagttagcggagaacatcaatgccgtcacactactgagagaagagctgtcggagaagaagtctgagattgccagtcttagcaagcagttaagtgatctcggtgctcagctggagagcagcatcagcccgagtgacaaggccgaagccatctctgccctgagcaagcagc

SEQ ID NO: 35465 - DNA, 1129 bp, Mus musculus
cactgaagctggaactcccgtggtggattgaccctcgggaacgtcccaccaagacgtggggtatggacctgtaccaccaaacctggcttttccctgtgaatcagggctgtgtagcagacactttatctgctgagtcagcccctggcctctctgtgctgcatctttaaaaggttttcactttaatttttatttagaaaagcttgaatcaatatagtgagaatcactttcattcttgtttgttgtttttaagggacagaacctctgcttgtctctctcctccttccctcttcctccttttcttctttctgttttgataaactagggatttgcacagggcctggtggtaccttgttggtggctccaggtccagagctatttttaagttctggacaatgtattgggatttttttctaatgcttagaaggcttgccttagcttatttggtaatctgcagctatcaaaggaagtgtcggacatagctgaatgtctgaatgtgcctgagtaagtagctatggagtctgggtagccacagggatgtgcaggtggactcaaagcagccaaggcctcggacagtgacctttcagttacagggcaatggtattgcgtgcggggctaggtcggtgtacctcgctgaggagacgtctgatgcccagcaccacagcctgggctctgctgctttgtttcccgtagcttcggaaagtttcatgagaagaatcggatttttcaagtgtcctgtgctcatcacactgtttgtgcctagccttctgcttgtctttgagaacggtgcttcccaggcgtctgacagtccgctcctgttcagtgacgcctagaggcggtgctcactcagcgagatcagttagcacagaggtctcgcatgatgtctgactgaggcaagatctgagtgcccttagaacacaacagaaggtgatctgtgtgtcagacttctaagcaggaccgtggggacaaaagtcatctaagtcttttctggttcagccttgtctatttttcgtttgttgtattatgttacttgagcactgccggcgtgatgtgaggacggatgggtatgaaatgtgcaggtcagtagacaagcttcaaggaccaactcgtgagttacccagtgggaaagtac

SEQ ID NO: 35466 - DNA, 1515 bp, Mus musculus
ccaaggccttcactgtaagccctgtctgaagagctgccttggtgggagtgcccacacagcacaggctgtgcccgggctcttgtcagcgctcagcagcactgccttctgggattgctgacaatcaatcatttgattgacagtttaaatcattctagaatattccaacaggaattaacatttgtacttttttactgtcatccctagagtgtgaatttaccttatcttgaagaaacaaaacagatctcacacaagctggctgtaggagcttacttgtttgtttccttatttcaccctagtgtccttttttcttcctttcagtcatggctccgaacctcatcttgaagaaatggagagagtgaggctgggcagccgctgcctgggaagctgtccacctgtggggcttttagagaatggcgctgtcattacaggccattggtgtagcttgaaggcagatgctactctggcctcagatacattgctgtggaagcaggcgcttttggtggggagatggtggtgggtttgtccttttttattcagttttttcttgggaagttttctgtggtttaaaggctgttctgactggccccacctggcttggctcttcagtgtctttttcttgtgttctccctctctttaaagaactgtccatcttccttatttattttagggtggtttctttttcttcctaaagacttgtgcaatatattttgaggtgaaacttagtgaatttttttctgataaattagagattttaattgactgtttcacagattgattttttgaatatttgctaaagcctagttctttatgctatgataagtcccaaatggcagtacctcatgtttacctagcttttggacttatattatttttcagaggaaaaaatactactgtaaattgtaaatagtacataatcctattgtctgcagctctgtgactgttggccatgtcatctcagaggatcagataaataaagtttatttcctatataatagtgttcattgtgcttctttttaagttgaaatcacttcaagatggctaagcacccgtgttccagttcaggttggtaatggagtgagggctgtcaggccagctgactgctggtcagtaggacagatgtgcgtgtgtatgttcaaagccacacgagcaatgaggaggatatggacacacacacacacacacacacgcacacacacacacacacgttataggagggtttctgctctgggagtcactgattgttcttatgcctaatgaaaggaagtttctgggcgggaagctgtgagaactgctcagaagggtccacacactcctcacatccgggggaacatggttctcagactcttagatctgtaaaacctctgcacgggatggaatgttggttatccagccagcctgccaccctcttggggtttcctgcgctgtgagggaggggccacccacaccctacaactgtagctcccttcttgtcttttatgcctcttccgagggtaggagtttggcctcttagtgctc

SEQ ID NO: 35467 - DNA, 1166 bp, Mus musculus
tggcctcagcaggttaaatgagaaccacgtgtttctcagcagcggctgatgagctctgtttatcttcagcgaaatttgtgctatggacttctttaacatcccattatgcccacaccagcaaggctgggggtcatgtttgttttaagggctgaagggaagctaaccggttagctctcacttttaaggcctattcatgttgggggccagaaagcaccttgcgcgtaagctgcattccaactggcccacccaatggcagcgaggagtcacggcagctgtgacacaatacattcaggctccaagtgataagaatgggtaccctcagtcagctaggagatggcactgctggcttgatttactcttgatatccacatagctcagaggtcagactctggcttgaatgatgtccatacagccctggctggcttgtcactaccttccagagcatatgaatggtgtacagacacagctcagggacacacaattttgccttgatcactcagatcaaatgcccagaaatgtaactatcactccacaattcaataatctctctttaactgcagaattcaggcaaacatttccccctctttataaagtatttggctcttgttgagaaaaaaaaaaaacaaaaacccagatcttaccctgaccctatttatgaaactttactatgtggctcacatctatacatgtacataaagaagaaaaaaaaagtggtttaaagctattgacaagatcagtggtatgtaaagggtgaggtatgaagaaatatgattccataacaaccattcccaaagtttgtggatttctcattgaagcttttggcagtgtaggcagttctatctgatttgaaattatcaccttctttttgattctcagatggaaatgaaggcaacttttgctggtgtgtgagtggcatttttttcaaaattggctctatgtagggattcccagtgactataaaattttcagatctttttgtacataaggaacaccctgtagatacattgtagagtttattgatagctaaggatctatcttccaagcccatggcagaaggaattatatctggtggcggtgtagctgatgtgggcagtggaaattttatttctcctagtttatattttcccccaggcactgagtgtggacatatacagagcacagggcca

SEQ ID NO: 35468 - DNA, 1158 bp, Mus musculus
gctggatctcaaatggtgaaccgccatgactagtcacatgctcagatgtcgatacaacttcaggaggcagattttaaggaaactatatggttgctcaggaagcaaatcctaaaaggcaccataggggagaggaggcctctttgcctatctgataatgttgagagctaggggtgtggctgcctggcacagaggcagggaaaggggtggagcattgtcttggaattctctcagctgagttgttcaatgtctccatcccagtctccctccagggatcaggaaaagtgggcaggtggattgatgtgcctgtgttagctctttctagaacattctttttaaaagcccactgtgtcgcctgttgtagccttcctctgcctctgagttcattctgcagacgttctccagggcgctatcaatagcctgcttgtttttcagttgtgtcttctgtgggtttaaccagctcaagaaagactagagcatccccaaagtgaaccctgccacagaaaggctatgacgtagacaaacaagaacaccagcaagaggggctggtcgattgactagcgcacaccctgtgtcctgccactgtggtctcaggcaatgatttgggaaagcacctcagggcccagcggtttgacaggctgcatgaagttgtctgtccgagtcccccatccatctatccttgtgctctaccactcaaccccctacccaacccacccccacgcaccaaatatcacatgacctactaaagccaaaggcaagggaaagtctcaataaacagcatgctgttgggacaccccggggaccagtgacccttgtggtgtggtcaagccccagtgtggagggtgtggaaatgttattcacatttatttaaggatgacacatacgtgatcatatatacctgattaccctggaaacataaacctagagaaggggtgcccagtgtcaacttcctgagatttagcggcactgcaaagcactggcgtttgatgagtggcgtaggatgcagctcagtcacagtgcttgcccgacacaggggaggcatcatttgggggacctgtcccattgataaacaaaaggcagaaactgaatattctcagaatgacttccccgagaacacagaattttagtcgatgtgggtttgggtagaggggtatgtgttct

SEQ ID NO: 35469 - DNA, 1624 bp, Mus musculus
accctggctcaggggacccgcccggcctcggctcactgagtgcagcccaggaagactccgtgctccgggccacagggtgaatgtcaccatgcctacctggtttgttttgttttgtttttttaaagaacagaaacaactattttaaaggaaaaaaaaaaactcttttaatagatttcataaacggactgcattttacaagattcgattttcttaaaaacataccaaaaagaaaaagaaaaaaaaagaagaagaaaagaaaagcaaaaactttgatatctcccgacttcctttcaactgacctccccttccaagcagacaaacctgtcctcttggtcccggtttggagcagctgacccaactcagaatctctttcctacaggatgaagtgcctttttgaatgttattttaagctgaaagttaatttttttgtatacagcctatttccaaacatcttttagtcttttacggtcttagatacttactctgagaagacgaacaggacaattttatagaccccggtagcctgtgtgtggtggggtaaggatgtggtcggggagagcaacgggtcacaggagcccgcctcccaacatgagtgactgtcaaccgtggcgtgcatgggatctcgctccccctgacatgacttttctcctgactgtccttgtgtcgtttccgaccaggctggaatgtacctgccaatggcccaatgctttatgaaacagccggttccttttatgatggtttctgaggttgttaaaaatgtgtcttgaggttgcatttttgcccttgggaagtgacattgtatcgtcacatgtgctttcccatgactccacgtgtctgtcccttgttgttctgttgtcgttggtttgaggagagcagttagagaaagccctgaagcccttggatctattaagtccttcctttcagaagctgggtgcacatggagctcgctgttcggactccgctgctactgcgctcctgacaccaaatggaactgaccagcggctgtcacactgttccttagccactgtgcctatgcttagaagatgctcaccgctcagctgcagactcagacagggtcacagacaggtgtcccaccccatcaagcacggcacccttctttggcccccagccaccgccaagaatgccgaagggcacaaaagtttggggacaaaaacaaaactgaagggccaaagcaccgctcaggtgcggcatggcgttcactttacactgcagtcaacatcagagcctaagctggaactcgcctgtctcacctgagaacctgtggcctcaaccagccgccatgctggtgtggctcaagtcacctctcagcctctttggaagcacagcctcttcgagccaagggttggagaagcctgccttgatgggagactcatctctccaaaccagggagaagggcttctccctggagcctgggggtctcttcccacccgttcccagtttggtgtttaatctgtgttacatcgaccctctgaagaacgaacagagcccttttgtgttggcaccaatgccttagtcctctgtgggttgggcctcagccagaattctgctgggagttgctggcgttgacaagatttaaagtcaggggtcaaacttttaaaaatat

SEQ ID NO: 35470 - DNA, 1175 bp, Mus musculus
ttctgagggctctgaaatctgcaccttatctgaccaagctccaataatgccaatttttatttcctttttttttttttgaaaacaaatccgctttatgtacataattgaaaaaaatctatatttttaatcagttacgtgtaaatgaagcaatagaactctaacaaggccaagaaaggagacgaatgttcgaggtttattttcttaaggtaaatacgggtattgcttttaattgtaagtttattaaaatgcgggcttgagaacgtatcagccatttctctgtgccatatccttcccacgttaccaaaacactccatctctttagccaaaagaaacccctgacctctcaagtcccgtggtcctctcagctccgggttaggacccctctcttagacaagcgctttcgatgcgagggtctaggacagggtggcttgggttggtggactccagcctacacctttagcttgacctcaagtggggcttcctgacccctgacccctgacccctgaggatgttaatgttcttgtcttccatttgttctggaatcctccatgtcggtctgtggtcccctgcactagctgtttgtaaacaatacgtttgtatcttaatcacaccacctgtcaccgatggcagtgggtgaagatcctgctgacacggtgcgatgttgtgaggtgactttggggacatgaggacgtccacatgacactaaatcatcccggtcacagcatgtgaagttgggggtacggagatgaatcctaaaagtgtgtagagcctggcagcattttacaaccctgtatttcaaagacggctttctaataaaatccagaaacacacagccctattggtcaaacactcgtgacgtttgtgcctctgctcctcacggtgctgtgctggacagctggcatgccagggtttgagaagagcggatggcctaccgtgctcgcggttccctgggcaaacttgctggctgcctctgttcctattttactgtaaatctgaccatgtctatccctggagtcgccctgaggataggttccccccaggggtggtgatgttggtgtctggggagttacagttttctgctggatgtttgaatgtgccgtcccagtgccacttgggaaataccacatgttgggatgtgcacgatgctcggggcaagtattgtcaatcagtgattt

SEQ ID NO: 35471 - DNA, 1385 bp, Mus musculus
gatccgcctggggctggctcttaacttttctgtattttactatgagatccttaataatccagagcttgcctgcacactggctaaaacggcttttgatgaggccatcacagagcttgatacactgaacgaagactcctacaaagacagcaccctcatcatgcagttgcttagagacaacttaacattatggacatcagacagtgcagggagaagaatgtgatgcagcagagggggccgaaaactaaaggcatccagggcaccaacctccttcccctcaagaaaacctttttacatctccattccttattccacttggatttcctctagcaaggaagcccattcgtgtgtatgggatcaactgtttatatagtcttttcacactgcagctttgggaaaactccatcccttggtttgtgttatctccgccttcctggtgtgcagttactgctgtagaaaagtatcaatagcttcatttcatgtaaacacgagtaacttccagacacttgtgtagaggagtgacagcacacttggtatttaagtaatctgaaccggttctacaagtgactgtgttttgtattactgcgaagatatggaaaatgtagtgcattacaatttaaagtaattgtaataataacgtcttgatttctacattccttttctgaaccttcttgggggtttcctttcagaagcaacttttccatgcacttattacaaattcctttttagtaggaatccagaagtgttagattgaatgagaaagcgcttaatgcatctgggcttggggtcacagatcgaaatgtctcctgtgtcacatattctggaggttacatctgtctgtgacaacagggagtttccttatgcattcttcatttgctgctgtttaagttgacaacttccttcccaataaaaattcacttacacctcaaaaaaaaaaaaaaaaaaaaaagagagacattcatacagaagagtgcaacctcacactcagaaatccgcctgcctctgcctcccgagtgctgggattaaaggtgtgcgccaccacgcccggctcagaatgttctttaaacagacttttcatagttttttcacccagtctaaagccccagaatcttctagggccctagggcccattaagaaagccattctgctaggatcagttaaaaccagtaatacctttattttatccctgaaaaccccttggaattttttacttagtgttttatccccttgaagttttcatttaattttttcacacaatatactttgatcatattcattccctcccccggctcctttcagaccctccctacctacccagcttcctgttctttaattacctggagtctcccctgtcacatggaagaacaggctacttgtcagtctaagcg

SEQ ID NO: 35472 - DNA, 3185 bp, Mus musculus
tgccatttgaaaaagattctcacttatggaatagtagaacaaaaacagatcacaggctatactcagttgcctcctaatcacaggcttttggtgtcttaacataagtcatacctttttactccactgttgctttaggggagtcaagacaatttaaagagttcatttaacagtgactcaggacttatttattcagcctattgatcagtgatagctttgctttgggaaatgactggccctttcttcccattctgattgtccatcgaagattcttaactttcacattaacttcaacattttaggattttatgaaaatgtatttgtgtagctactcactaattttctttgtatgattgcagtggcagccaatctgcagaagattgtggaagaacctcagtcaaaccgatctgtcactttcaaactggtactcacccttcctctctagacagctgttccatcccctaactgccaaggctagagagtatgctgagtcagtggggcagtggtggtgcacgcttttaatcccagcatttgggaagcagaggcaggtggctgagtttgaggacagccgaggctacacagagaaaaaccctgtcctgaaaaaccaaaaacggctctgccgagttgtgttcgttcattttgcccaagccctgactgcactcttagtctgcatggcctcacttctctccttcctagaagctacaacccaggcctctaactcttccaaggaagttataaagctatttgacatagttatacaaacagccccagcatttctagaagaaacacagtggcctctttatatctcagggacctttcacctaccgccttcctttctgcagccccttatccgtttttattgctacccgaacttttgtttataaattgccacaccttgtcattttgtttggttcgtaggcatctggtgttgaaggctcggatattcctgatgatggcaaactgataggatttgcccagctcagcatcagctaaaccacagacctggaagagtcagcctaggagatgccacacatgcacatgtctgttgcttctgttggcctgaacctacaactgccaaagaacccagcaacaaacctcccagcttggagctttagtttttttctttgtttttcttgctgccctcctccctgccccccttttcttacaaggaaagaaaagttggatcgtcagtggccagcctcccctcagagagttccgttggtagatacgctgctcatgtcccctctccctccatctgagaagcagaagcggccagtgtgcctcaaggcccaggatggaagactctcaactcattcttgccttactacagtgatggtcccagtggatagagcagctgcactgggcaacctcatcttgcctgctctcccgcacctgctgggacatgagcatcttgggatatctctttaacactcaagtagcaattaaagttgattgttcagctggagcccagagaatttaattactgtttttttctttgtacctgatgtgaattctagcaacctttgttaggaaaaagcacagcctcgaatggaggcagcctaaactcttgtctgtcctcttcatggtgtctcttccgtgttttgctgagctgttctcaggcaccccctcactgctccctcttgaaagggttgctagccttaacttcagctggtgcgaaacatctgactgttgtcagactccagccatctgctcctgcagcgtgcagctttggattgtttgtgcagaaaacagcaagcgatggctgataaatcttatcttgccagaggtagtttttgaacaagaaaaagaactttgtaaatcatatcattgggaaagtattttcaatatttaaaaaaattaagctgaagaaaaactgatctttgatcctcctgtgaagatggacttgcctggccttagtcatgtggaaatggtgtacccggctgagatttttacagcaataaaggggactctcactaggctagaggccgccttctgctcctctcttgcactgactctgtggagggggtcttcattcactaaactgacccaggatggaacacgaaaccacacgtgccgtgacctttaggtttatgagtagacagtgttaatttgattttctacaggaattatgtaacttattctttaggtttaaaaagaatgctcaaaggctatacagagaagccctgtatcaaaaaccaaaccaaacaaacgaacaagatcaatgcaatatgggaataatcagtgaggttggcttttttccctactgttaaatagcatttgtctaattgctaataagcctgtcgttaccaaattttatataagaatggaatagtcagtctggccttaaagagacacacaaagatgggctgtgagcccctagaaagggactagttagttgcctttgatagaattccttgcacctgccattgttggtttgatgaacacgattaggtacccagtgtgatcccaccctcaccccacctcacccagagcaaaccgtaggactgctcctagaagcagctctgttgacttctcttggaacacacctgaacgctttcctcatttctaacctgtgccacctcttgtttcgttcatgctgagcctgtagtttcagtcatggacttttgtactgttgagtgcaaaggcatgttgggaaaggtgttggggaggaagagaagatggatttgagaggggagttgggagactagagagttcaaggtcccagcaggttggtaaaaggaggagcctaccaagttaggagggagaaaaaagattaaccagctagttagaaaaccatttatttttctttcttctttccccacttgttagaggtagggctatgaggaagcaaggatgggaggtggggttgaggtttgggaagcaggcagcaagcgttacctttgcagaagactcgtgtcttgctgtagaatccagtttggtttcagcagcttgacttaatgcacttacaggctcaggaaggaatttgctatcactgttgtggcttttgacttggggtggtccagtgccaggctggaagtaagcacagcccatctcctgttcacattctctagaccgtcatcacctttgccctgctctgggggacagacatgacagtaaaagtgtcccgggactctttccgttcattgtttgcttttttggcaactaggaggttggcactaagacccagg

SEQ ID NO: 35473 - DNA, 1173 bp, Mus musculus
tccaccgtgtggtccttgggtttgaactcacgctgtcaggtttggtggcagtggaaccttttcctactgagccacgctgacgcccctgaggttctgaagcttgtgctctgcagcttcctcgggtgtttcccctcgtccgtcgtccactgtgggacacagcaggctcagccgtcattgtttaactgtggggtgctttatgtgtgtatttatttacatatgtgtttgtttgcagggagtggagcaactgccgtggtccaagcagcttactgtgcccccaaaaaggagagagtggcgatcaagcggataaacctggagaagtgtcagaccagcatggatgagctcctggtacgcgcagctcaggctccctccacggagggaggagtgtgttcttagagttcatgttaaaaaaagaggtgtttagtttcttttgagaacgtgacttattttcattaataaatgattataaaatttataaagttaaagtaagttgaaaaaattacttacaattttattactctgaggttaacatttaatacatacatttttttagactgaatattttaatttcttagcatttttgagattttgctctttttgtgtattcgctctgtccagggactggcttgtaccactgtctgtttgctcgggtaggtttggtaactatgtgtgtactatgcactgaagaatgtacatagtttagagcatatgtcctggtattgtatgattgatgtttgttcttatttatatacatggtggctactttcgttctcatttctttaagtaatacgtgggtttttgattcctgggttaagaatcttttaaaagatactgtccttcgagaaacagagtatcaatgtgtcttctgtatcctgatggaagatgaggagagagagagaacactgatcctttacctctacttattttaaaagcttgttttttttttttttttgttttgagacaaggtctcactacgtacctcaggttactctgcaacccttagattcagaccatagatcaggcaggccttagactctcagtctcacagagatccagcagcttctgccacctgagtgctgagattaaaggcatgtgccaccttgttggtttaaagtttttttagcgtttactttgggaggaggggtactcatgcgcacatgtccatgtttgtgggtc

SEQ ID NO: 35474 - DNA, 1102 bp, Mus musculus
cctgcagaactcagggcggtgtccatgtacacaaggacaggctgacggtcacctctccggtcctgatgtgggtccaggtaagcatagggaggctcccttccctcctcagtatgcagcctgtggcactgctggccccgcaatggcagctcttgggggcatccaatgagactgtttaattctggggttaaaataagccagcattcattgtttgtttgtttactttgaaacagggtttcctatgtaatcctggccatcctggaactcactctgaccaggctggctttgaactaagagatccacgtgcttctttctccgcagtgctgaggttaaaggcgtgcatcaccacacctgactggctgtttgtttatttatttatttatttttgtttgtttgtttgtttaaagatgaggtctcatagctcagggtggtctcgaactcattatgtggccaaggatgaccttgaacttctgaccccgcctttacttcctgagtgttaggactatagtatgtagctggatgaccttgaacttctgaccccgcctttacctcatgagtgttaggactatagtatgtagctttatgcccagtgtatgtggccctgggacttcctgcatgctagccaaacattctaccaactgctgtgtcctgagcctgtgctccctttaaaaagacacagagccaggctttcctagaccctgtcatcaggccaagcatggcctcagggttttagtgtcttagtatttgtccccactacagggtcacttagaatgtcgtcttataattaactagtcaggctgaggtcaaccctaagctagacctgcctggtcaggaccaccctcctgtggccatatctggtgacccatacaaggatccatctaacacgaacatgatatgtctgagcttgcctcatgctgatggcaccaaaatccttcagcttagaagccaaccaaaggccccacttagtgtgtctgccaaaagcctttctccatcctccagtacccattgaaccatctcctatattattatttctttttaaaaaaaaatagactactgtgagttctgttttatctacctgatcatgagtcagacaccgggagaacag

SEQ ID NO: 35475 - DNA, 1275 bp, Mus musculus
ggtgctgaagcgtgctcaactttgtaggagctccggggcgggcttagggcagttccaggaaacgtggacagtcgggcattaagactccagagaaaagatcgtggagattaggacggctggtgcccggtggctggggctctgggtcctgcgcgtctttgttcccaacccccattacacatgcagctcgggtcccctgcggcccgaggtggcagcagcgcggagtctgggaaacccgcgaggggcggggcccggagtgtagggaagggctgggatcccccttgcagctgcgggggtgggtatcccagatggtcattgcaccccctcacagggatcctcactttcaatcttttctattacaaggtagtgagggttagctgttaattccgaccccgagagtttttgcacgagcctgggtgcggtggagcatgagtgtacgaaccagagggcagagataacttctttgctacccgagcccactgttgggaagcggtttcagtgctgtcctggagtggtagaggcaacgcggtgctcagggtgaacattttgtttctttctgccactccccgaagtgttgctccagagatttttcaccccaagaatgagagcctggaagtgatggaaaacagtggtctgctccggggagggcggcagcaggctgaccccaagttataggaccaacctctagtcggctcttgacttactggatttctgcacctggacatgtatgtgccttgcctcttttaagtttaggtttgttgaaagcattgtctcaggaccgttcgcctcagactagaagtctgtatgtacatcactgctcctgtttgttccagtttgacctcaccagtcacttcccatttggaggggcagagtgagagtggatccctggtaccacatttgctgcactgtttgggggagtgcataacggaacacagaggcacgtgttctgactcaacctgtggttctgcctttggggatagagtcacctgtgttgtggtggctgctgctttctcttttgaggaactggaggaaaactttgaagggttggggtagagctggccttcctgtgcctctggcttcagagatctttccttcatgtttctggcttgatattcggaattactcagctctgtggtaaaaaggagagatctgtatattggtgctgccagcgggaacatgggctcgacagatatattcaacttaaaaattcccaacagccctgttagtaaaagaaagaaatagctgtgtctttagtgttttctgactgctttcataccg

SEQ ID NO: 35476 - DNA, 2073 bp, Mus musculus
gtgtattatttcccgtcctatatctaaaaggttcatggggtcatagtggggcaaaaaaggggcacgcgcaggggtaggggtggagtaagtgggcaaaggtgtgatgagtgtttggtgtgttcaaccatctgcaatcgtagcttagccctcctgtctgagaaaagtgacccttggtgaccctgggagcttacccttttcctgtaagcgtagctgttcttcagtacctggtgaacacaggtgagaaagagcgcaggaaggtcccaggaaggtcccgcttccaggttggtgtgggcagggaatggaggaacactagcctggtcttcgtaaaaggtgttgatgtgtgggtggtaagggggccagtatcgagagcagaggggtgggttggcatcttcaccaagcaccttcagcaggcgtcgtctccaggactggttacaagtcacctcaccgtgctcagcctctcttctctcgggcgcaggttccgggcgaggggaggctgagactcgggagtgcatctactacaacgccaactgggagctggagcgcaccaaccagagcggcctggagcgctgcgagggggaacaggacaagcggctgcactgctacgcctcgtggcgcaacagctcgggcaccatcgagctggtgaagaagggctgctggctagatgacttcaattgctacgacaggtacacaggggagcgggagcgttcccgctgccgtagcccgctgcacttggccacccactgatctcagggtctcttcggaggcactacccagaatcccaagcccctgttctggtgtttgctctcctcagctcaggcagcatttccatgcctgcctgcccctctcagccttgagtcacactcttcaagggacgtggggtcaccctaactgctgatgtttctgaagctgcgctgcctggggggaggggccggggagagtctttccgtccctgccggggagtttgtaacggggaccctgggccctcaggcaggagtgtgtggccaccgaggagaacccccaggtgtacttctgctgctgcgaaggcaacttctgcaacgagcgcttcacccacttgccggagcctgggggcccagaaggtgaggggcctgtgggaagagggtctgagtgtggcactgtggagccagtggggagtgcttgcagggccggctggagtgttagagtgggcgggctgtgtgacacagggctccatgtgtcccccagtcacgtacgagccacccccgacagcccccaccctgctcacggtgctggcctactcgctgctgcccattggaggcctctctctcatcgtcctgctggccttctggatgtatcgtcatcggaagcctccctacggccatgtggacatccatgaggtgagacagtgccagcgttgggcagggagaagggacggctgtgcggactcctttaagcccttgcctttccaggacccggggcctccgcccccatcccctctggtgggcctgaagccactacagctgctggagatcaaggctcggggccgctttggctgcgtttggaaagctcagctcatgaacgactttgtggctgtgaagatcttcccacttcaggtgagcttttgggggtctccaggccatcttctctcactgtggtccaagcgggagtgtctttccatggggcagtcgactgtccaggattctgattcagtactgagagtccatcagaggattagggtcagacgccatgttggttttgggttctgccattacttccgtgttgtgtatgcagtttgcatgttttgtgtacgcacaggtctgtgtgtggaggccagagaatgaatccctttattggactcctttttatttttttggagacaggatttcagtatgtaatccagactggcctagaacttgtcatatagaccaggctggccttgaaccaaaagtctacctgcctccacctcccagatgctagaattaaaggtgtgcaccaccaaacctggctctctactttttacagttctttatttttattcctttttaatgaaaaaaaaaattttttttttttttctgttttttcgagacagccctgtgt

SEQ ID NO: 35477 - DNA, 2602 bp, Mus musculus
acatccacagggaagggcggatccctttctcatcactgggctaccaggcctgctgggccttcctgaccaggcttgagcttctagcaaggtgcgtgatcctgtctgttctggtctctcttcatccctggcattgaccatgcccttgactctctgtcttgctactctaccctactctgccctagggcttaggctctgtgaaggatttttcttggtggccagcctacataggtatttaatggttgccatgtgctcttcggctcagagagcctgtcatgtggcatttcctatgctcggccactgaggcaaagaagtgactgtcccatctagagctggagggccggatggttctctcacacacagactttggttctctcacacacagacttttacctttgtagtgtatgaagttcctggtgcatcctggtggctaggagaatgtcctcgttgtttttcctacttaactaatgcagtaaaagcttactgtgctgtgagttgaattcctgccgttgttcttaggacatggttcattagatgaatccctgaatctgaggagctctcaggtcgctcagcttggtctctggcatcagctgttgcatctttttgggcttttggagacacagctttggacgtgatcaagcctggtccacatctcaggcaggacttgtagaggacagctttcctaaaagtgtgggaaaccgccaggaagggatggtgtcccaggaatcctttcctctcagaacctggagacatggctttttcttcatccctggctgtctgtaaaggctaaattgagaagtgctcagcagctggcttgtccagcgcagtgatgaggttaaacctcagctaacatcatgttatataagtaggcccagtaactcagctgatgggtttcttagaatctagatgctaaacgctccatgcattcaagattaaatgcctagttcttcttcacacacagttctgggtagttgactcgtagccagcagccctcctgtggatgtaccccagacctttagaaagatgttgaggaaagtgctttttgcgataccaatttagttttataggaaaaagaaactgaaggtcaaaacactcccttggaaatcaactagttggttcaaccacgttaaagaagaaaggaagaaggaaagagagtttaagaggcgcgtgaactatcgtatcaataagtatgcccaagttcttttgtgggatccttgggatagtgctatttggacctatctgtgattaatgactgtgaaccactgttgggctgaccgtttgcagtgagatcaggaatgcctgcgtctgctggcactaaaccaagctgtagcattttcatgctggcatcttccaggtgtgaaggaagcaagactttgccctcctggtgctccgtggagctccttagtgcccagaccagcgccatttcccccatccacggcagctccgggccatgatttccccaagaattaaagttcctgttcctcatgccggtgaggggtagtgggctctgcgctgaccccttgctctccaggccggtgtctacactgcttaggctgagttagtgtgtgcagccctatgggtgcgtgtggtaatcgattcagacgggtgttctgaacacctgcagagaacagttactgcattcggttgtagactttgtgcttttgagtttacagttgggggaagtgtgacccattagttttttcaggcacgtgaaggtgggttattgtgaataaacgagcattgcctcaagtcctggggcacccaccctgcatgggcccattctggctcctggtcactttacaccagtgttgttagatagtgctgtaaataagagtaagttatataacagacgccacttgaaattttactttaagaagtctatagctccacacatatatttagttatatctcttgacagattgcctccacacagtatggagattgttttataccacagattatttttataaactagtgagtcgaagtgagaatgcgtctgtaatccaagccaatgagctttactgtcaggattatgtgcaccctggagccgagtgctgggagcttagcttagtgcatgcatagcttcctgaatacactggcagcctggagttggcttacgggttcccctttggcagtggtatctgtcctgcttcctgcctgtgagaggacagcagccaggccaggcaagggacctggagttggtttgatttctgctgaacaaagggttctgaggttgaaagtttgtcagctccttccgtagaaagtagtcccgcaagttaaagagcaggaggacagaagctgtgtgccccacgcctagagaatgattcgggctataggaaccattgaaatggggattggtggccgagttccactaaccagaactatctaggaccaaactgagtcatcctttggaaacggcggggcacatggatgtcatggtggaaataagtggagagttgctgagcaaattttgcccctttcagtcggggccattcatcccagaggctgcttgctttctgctctaactgtcgagttaatcaggaaccaatggaggaagctcagaaccccagtctcctggcaggttatctttccagttcttgcagag

SEQ ID NO: 35478 - DNA, 2078 bp, Mus musculus
ccagggccagcgtgttcccggtgggtttcaactcagccctctgggtgtttggtctctgcctcacttagcggacttagtccttagtccttgtaagtgctttagccccagtggggttttcccagagcactgccacgagttgagtgtatgagtttagccaaataatttctccactgggaaaagcactatcacggaaattgtacctgcttcaaaagagaccagagtaggaaagactagttgcctaggccgtctgggagcaagcagttgtcacgtgcgggcaggagatctcatctgaaaagctaggtccaccagcaggggtgcagttgttaaaatgccagtggcttgctttcccatgtccccccacctaccccctgaattctgtaactgcaaaggaaactgagtggtactggagaaccgcagggagggtaccacagatgagagacaacgcttctagacttcagttcatgccacggatgcacacgatgccgtttcaactgtacgggagaatctgcttacgaacctgacgtcatccctgtgatggcgtcagaggccacagttttcacacgttaccatctctgcacatttgtcctcgaatctgagtcgcattattcagtactgtaaagttaacttgcgtcgagtttgatgtcgattcctgtgaagaagagcttttggcacgtgacagacagtgagttacaaaacacagcaaagcacggaattttttgcagggacaattttggaaccaacagaaaatgtcactttttagttagcatcttatgtatcacttttaccggctatttctaactttggaagggaaaccttgaagcttgtgtaacttagtggaaatgtgtgtgtcgcccttaggatgggtagccaagtctcactaagctgtgttaatctaacttgtatatatgaattgtaattaagagtttggattcacctgtttctcacggtttaaaagtgatgggtcattgcgaagtctggagatgtgactagtctatgatttcaagctgttagaagtcaggaagctctctgaaatgctaaaactaagattctagttttgggctcaaattcgattaagtactgtttgtatgccagagtatgtgaggtgtaaatgtagtggggtacttttcacccttgtagctgtaaaattcacattttgtagaacagaaaatagcttgtactactgaattaacaagttatactaaagtatcatgtcttaaaaacaaaaacaaaaatacatatatctatctatatatatacacacacacacagagttaagcttgttgctgttaccctgtctggatttgaaaattgtgctgatttatataacacacacacacatacacacacacacacacacacacacccctataatggcctgaagcagacatacctgtaactacagttgcaaactgcagacattttggagagaacactgtaccatagctcattcattgcgtggctctttgctcctttttcctgtggtcattttagaaacgagtgtcaagtttgaaattagatctgctaagttggggttctgctgctgaattctgcactgggtccccaaacaaaccgatgtgaatgtagtttttccccctgtgtgaaggagcagccacagccccatcagaataggaggaaaagtctagaagtatctcaaggtttatctttttgtatatgaaaataaataataataaataaaataacctcgtctgtattttttttttaatttgtgattatttctgcatgtgtgtatctatgccatctatgtgtggatgcccagaaaggccaaaactgctcagagaggccaaaacttgtgatcagatcctctggagctggagttacaggtagtggagagccgacatgtgggtgctgggaattgaacttgggtcctctggaagagtagcaagtgtccttaaccactgagccatctctctagagccctggctgacctggaaactcactttgttgaccaggctagcctcgaactcagaaaaccgcctgcctctgcctcccgagtgcagggattaaaggtgtgcgccaccatgcccagtgcacagggtgtaccccatcgtgacagggaa

SEQ ID NO: 35479 - DNA, 1146 bp, Mus musculus
gctccatctgccctgcgctgctctgctctgggggctttaaggaaagcttgctctagaaccctgtcacccatggacgttctgtgtgctgcagccatgcatgccattgaggaggatgtgctgggataaagcattcgtgggcaccagccatctcacagtcttacttgtaagggtctacagatcttgtcctgttgtctgtcagccagggagaggcacagcaggattggtgggggcggcagcttcttcccatgttcctctattttctgactgactgtcctgcctcagtgggatattgggtatatgccagtacacactgttgaaaggttggtgagatggaatagacaaaaaaaagggctgagaggaggcttgcagactgagatgtctgggtcattaacagcaagcagacctgcttgtcttgagctgggctgtcagtaatgctattcttctcacagtgcttcagtcctcctgaagtaagataacattagcttgaagttagtttagtattggaattggcactagaaggctacacctcaccatggcttggcttctgttggtgcccattaggtttcttatgtaattcgagatgaagtggagaaatacaatcggaatggagtcaatgccctgcaactggacccagcactcaacagactcttcacagcaggtcgagactccatcataagaatatggagtgtcaatcagcacaaggtaagtaaggcaggagccgtgtgtttgggttaactcgcctcttggaccagtggctctgtctgatggaactcctttcctcagtcccggctttaatctctgagcactgggcttcttaatatattctataaagacatcaccagagttctgtaagcctgtgagagaacgcctccaggaaagtttcacaagtatttttacttaactcagggctgccataattagtttgctgtaagagtttgctgccacagcggagtaaaagtattcagctggtgaggaatgagcactttccgtgggattttggcttaattatgaacccgaaaagtctcttgataatggtgctgagagtagaaaaacacatgttgagtgtgtacttttacaaaagtgactaaggacctcacagcacactaggggcttactggctaatgtggtagatgtgaagctgccggg

SEQ ID NO: 35480 - DNA, 1158 bp, Mus musculus
acaacagaaagcattgaattgggtactaatcaggagattagtccatgaccatcatggtggggaatgtagtggcagacaggtatggcgctggggcagtagctcagagctcacagctggtccagaagttgcaggcaggcagagtgtgggcctggcataagcttttaaagtcacaaggtgcccctcagtgacacttttgttcctacaaaatgacacctcttaatctttcaaaaattcaaatatatgagcctgtgagagccattctcattcagagtaccacagagccttgtgggtttgctctttgtttgtttggggatagttgtaagtttttctttttaagaaagctcaacattctctccttaagacttgttggggatttcttgctggttgactcagtggcttcctgctgtgattgggtatgtctcatgtacctgtgataactcaacatttactagttctacagctataacattctcaactcttgacaagcctggagaacataaaatgctgaaattattaattttgttcctttagacactgaagggaattcataattttcgagcctctggtgattatgacaatgattgtacaaaccccataacgcccctctgcacacagcccgaccaagttattaaaggtaagaaggccccaggcaagcagactttaatgaggttacagttaatgagcatgatgactttcaaagtggcggcctttctttaaatgcagtgctgctatagacaaaagcccagtaacctgtgcttgcttttagcacaagaaaatgatggtaagagatgagaagggtttttaagaacgtgtttgatgtattctttgactgcttctgccatgtgtatcgcgcgtcgtcatcatcatacctattcccaggtcatctcttctggtcccttcacacctcctcagcatgtcccctcctaccttcatgagtgatttttaaataaccgactgggtcccatcagtgctgtccatatgcacaggagtgtggggcccacaggccacctaccagcagtcacaagaaatgagtttttgattgatttttttttttttaattaatggctattggtggtacagatgagggcttgcatggggtgcttcagtacatgcatgtatagcgatgaggtccgttctcccagacctaagggttgcttt

SEQ ID NO: 35481 - DNA, 1198 bp, Mus musculus
cattgggcctgccacctagaggctatctagggaccgtagaaacactgtttgtgggcctgtgagttccttgatgttagggggcccatctgcttctagcatatagaagtagagaggctctgcttgagtaaaacatgcttttggctctattgtcctcgagtggaggtgaggcacaggtagtcatttatgagttggaaactgtgactcagcgatggggagaaccttgtgccgcagtgaggtgggggcagccaggccagtgctagacatggtaggccgcatggtccccatttgcacctggattcaagggaggttcagagaacaggggcattacctgtgggtacctggggatcccctcggggagcggcagaaagcttccccagtatgtgtttgtagggaggatctggctggcctcccatcacggggaggaagggcagtgcttgccgtgcaagggctctagttaggttgaagtgaacatctgtgcaccggaggtttctaggcactggcctaactaaccctcagtttctcccttcctggtacctctaggccctaccacaagtccctggtagctttatggagggacagctccttgggcctgggagtcccagccatggcgctgctgactgtgggggatgcctgcgtgctatggagatcccgcttcagcctccacctccagtgcagcgggtcatggacccaggtatggggcaggtcctgaaagagactgcagtacctagagccctgatgctaaagtgggctacaggctcacagctggacttgcacagcagtgccccagctttcctcaggacctgctagcctctgtcagtccagtccagagtagaggaggcccactctgggtgacttggtagatagaggtaaagcaggatttgggccaactgccatggtattactccatgatgttcagctctgggttctttctgtcccttagacacaggtggtgggagtctcgatggggttggagggaaggcatctgtggggctgagggcgagctaggtagcccaggaatatggcagagggaaggcaggctcccatatctccagtagttggaggttttttgttttgtttttttttttttttgcgagcaaagaactgggtttgctttccctctccaggcttcctggatgtatcaggcatgtccctcctggacagcagcaacataagcgtgtgccccagcctgtcatcttcc

SEQ ID NO: 35482 - DNA, 1157 bp, Mus musculus
gcgatgtgttcctggtacagcttgtgatgggggagctggctgtactttggagacagcagtaagttagtaattgagaggggcagggagcaccgagagcaggggtggggagcaccgagagcaggggtgggtgcagctgagcgcatgtcctgaccctgggatccgctctccttcactgtcagcctgtccctgcctgctcaactggagctaggcagctactcagggtctaggcgcttcagaatctggccacaggctgccttgcccagcccttatagcaaggtctggctgcatttctcctgcgtgtctgggctttcctgcccaatcccagttttggggtgggggtggggtgatatcctttaggtgccccttactccagggctatctgagtcctttctggaagcattcgcgtatcacggttgggaaacttatgtcagggaaggaggtgagtgggggggtgggtgagcagagcagtctgcggaggtgagaccttcccactggtccagggtgggggctgggctccttgggccgtgacgcacctctgctctggaacaggtacaagagaactcgccggcccagcaggcaggcctggagccctacttcgacttcatcatcaccatcgggcactcgaggctggtgaggctccccactgccccgtccccacaggctgctcctgttcgcttctgcctccttttttcttcccctgtgaccagggccacagagggacatttggaggcatccagcaggcctaagaaggctgcctttcaagacatatgaggccttaggatgtggccctaagaggccttttgcttgctttgttagttttctggaaggcttggggaccaaagcttggggtgcctgaactgggtgatgctggctcaggtgctgcctggagctgggtggtggctgtggtggctgcaggcccaaacctagcctgtgaagccgggcccagcaatcgtttcagtttgccctcacaccctgtgctccatgcctctcagtccctgaccagtctaagggttctggcccaggggtgggaggtctcagacagagccagctcctccctgaccctgcagaacaaggagaacgacacgctgaaggcattgctgaaggccaatgtggagaagccggtgaagctggaggtattcaacatgaagaccatgaag

SEQ ID NO: 35483 - DNA, 1208 bp, Mus musculus
tatagtctgggacctcactatacttcccgaagggtgtcgggcagcccggatagccttgagaccttccacccattgcccagcttctctccaccacgggatgcgagcacttgcttcctggagtctctcgtgggcctgtctgagccggttacagaagtcctggcaccccttctggagagccagtttgaggatgctgccttggcacctttgttggagcctgtgccagtgtaaggattaaggtgccttcttcctgccctgagaccctgttgctgctctttgtgatcttggggttccccgaggtctatgtatgtaacggtctcctacgggctggtcctgctcatggtgccatgtgggcaccctctatttttacattaacactctgaatttatttatttttttatgtttttctgtactgaagaagggagggtggggagggtacccctctttcaatgcctggtctctttatgtccaaacagaggtcttccacctcctactgtatgcctgaaggaggaaggggcggggctctcctggagcctcgcagtccctctttctgtactgtaagatgctccttgctccaaagacagcgacggctgagcgcagggccttaggggcttctgtgaaccataggagctaggtcttctggactgtgaagatgtaatttatatctgtaatttatttggggatggagacggcagtggtggagcctctctggcgggtgggcaggcagtgttggggccgaggcttcggtgtaccctgccagtctgggcttcggtgtggtgtgtgggttcgagtttatggctgctctattaaacagcggcctggctcaactgagcagacagaggctgtgcttgaccagcggtgaccaaaaccccttctgcccccttcccagaaactctacttgccctctttccaattccctctccccaaggccatggattataaagcccctctgtaagatggtgagccaggggccctaagagggcatgaagcacaccctgatcactgtctcaggcctttctgggcactgactcgaccctggcccacctcacgcccccaggccagttggcaactggtggctcttgagagctcttacgcccttcattagctgatgttggattttatatgcatttttttattgtctctaagtgtcagaactataatttattcatttctttgtgtgtgtgtgtgtgccaagaaacgcaggctctggg

SEQ ID NO: 35484 - DNA, 1217 bp, Mus musculus
caaaatggggtttaaacttagagcttttcacatgctgagaaagtgccctaccattgagctacatgcttcttcagctagccctgtagactatttcctgagcagactcagccacccggcagcttctgtgtaccaaagctgtgtgttgaggatctcagaccccagattaccacagataaagggcaggctgactcccccacccccactctgcttgtcctctgtacacatgtacatccaggactgaagactgaagaaagggcccgtcatcctccccaccctcggtgccatttaggcaggacagaaggtcacctccctactacacccgggggaggggagaatggaatcctgagggttggactagccactgacagcattcatctaggacagtcagaagaacccagaatgcagcgggagcggggctgggagggggagggtcgagcttccacgaaggcttccaggaggaggaggcagtccttgctgagccatcctagacgttgttgggattccctcaggtgagcagagtgagggtgaaacgttccaggcggtgcagtcagaacgggagagaaaagcgctctaggtactgggtcgaactggccctgccgtgggctgacgaggactcgggtgggctcctgagagagaagttgactgctagaacacactttcttctgcctagtagtacagggagttggctgcgagcctaaggaaggtcttggcgggagcagaggaggcagcaatccgctgtaagtagccagggtccggcctaggagaaaccagattctttttttttttttttttaaggagggatgggggtggggaagctggttccagcaatctctactttaggtattgttcggagtaagggctctggcccgagggcagaggtgaaggccaggccctaggatgaccttttcttctctcctcatccctggctggtctccagtctgagctaactttctgcgggatctgggaaaaagaggtggggtgagggccggggaagggtcctcagattgaattgataataatctgccctgggcgggtggaggcaggggaggagcttccatcgctcgcagcctcagtctacccagtctgcagctcgggactgctcggcgtggagaagcgggcatctctaggacccggctctgcacgaagctcggctccgcgatcttaggagccgagcgcggagcagcggcgtcgcggcccggtcacagtccgcggggagg

SEQ ID NO: 35485 - DNA, 1548 bp, Mus musculus
gaactgagcctgtgtgttctcataagtgaatgttaagagatttgttagtgtttgggggaagggggtcattttgtgtgtgcccagtgtattcctgtacctcgggcaatgagctgccatttgggtgtgtggaatctaagacttgggctggtgacatgagtcgggctggcttgtgtttaataactatcctccttacagggagctcactcagtgggtctgatgtggtggatgctggccagggaagtactccgcatgcgaggtactatctcccgtgagcacccctgggaggtcatgcctgatctttacttctacagagacccagaggaggtaaggctttctctagtatatgctggggccacaagggatgggcagaccttggttctggttcagtgaagctaattttgtcccttctgtgcttttaaaaaactagattgagaaggaggagcaggctgctgctgagaaggctgtgaccaaggaggaattccagggtgaatggaccgcaccagctcctgagttcactgctgctcagcctgaggtggccgactggtctgagggtgtgcaggttccctctgtgcccatccagcagttccccacgggtgcgtatcaaggccagggcatcaggctgccagggagcttttacagtgtggggttgtgagagattggcgaagcttcagtggccatgagtgactctgggtgacttcagtggctcctgacactggatgggcgggcgggtggatacactgtgtcttgacactgctcttggggtaatttggggaaagttatactcctttcctagagctgatgattttttttttgtactttcttaacagaagactggagtgcacagccagccactgaggattggtcagcagctcccacagcgcaggccactgagtgggttggagccaccactgagtggtcctgagctgctgtgcaggtgcctgagcaaagggaaaaaagatggaaggaaaataaagttgctaaaagctgtcttatggtcctcactgcagactgtacctggattggcatttggctatacaacagaggcatggtcctactgacatgttttgtgttgaatacttaagcatgtgaacacatgggttttttttttttttaatgtaaaatgtagtaacacaatgtttaggtggctttggtgttagctctggagacttcatgtgtcatctaggtgaggtgttctttaacacagggtctctgttctgtcatgcctcatagatccttctacctccagattggagagggaaaaggcttatgtcactgaacctggccagattgggattttgtgtcccaggaacaaagttaatgctaaaaagttaatgccttggtgagactgatagtctgatggtgtgaattcacagtaagtggttgggattgccagatggaattccctgagctgccgtgacaggtggcattgcagaagtgaaggattcaggaatttgagtgttgggtgggggcctgtgaatagcacttgggctgggaggggagactgctgcccctgaatgtcctggaattcaaggacagtacctggttaaa

SEQ ID NO: 35486 - DNA, 1142 bp, Mus musculus
aatgtactggttttatcaatacagaaaacagtgctttgctgtatctattgaggaaccatggtctttgttcattattgttcatttttcatgcgtgatggtttatatcagctgtcaacccaacaggacctagagtcacccaggaaaggaacccttgggtatgtctgtctgaaggcatgcctgtgaggcagtttcttggttgtgctaactgagataggaagatccatcctaaatgtgcttagtaccagtttctggtctgagttcagtgacttgaataaaaaggagaaagtgagctgagcaccaccatcatcgctcagtgttcattgctcagtcttcatcacgcttcactctggctgtggatacaatgtaacgagctgttgcaagcccctgcagccattcagactctgccatgatagactgtaccttggaactgtgagccaaaataaagccttccttccttagattgcttttgtagagggatttcatcacagtaccaggaaaagcacctcaagcaatgttagccttgcattttagcataactgctagcattttgtcacactgctggtttggcgtgatattggtcaggaaatttgaatctgtaattgtaagggtgttggttttgttgtgttatatcattacactgtctctgtttgcctctagtgtctgatgatgtttgccccctttaaacaagttgggaagtgtcttttctttgttctgttcatggaagacctatgctcactcttccttatgtgccatatcatcagtgaagtcacccagtcctctgctttccttcctggaaacattttgttgttgttgttgttgttgttacagattcagtctctttactagatatttgtcaactcagagttttcatctttcctgaatctgtttcggcaatgtcttcttaggaatttttctatcttatctagttcatctaatttgttgctttttaatttttcattgcattttttttcttaatcccttttgtttctctaaggtctactgatgtctctttttttatacattaatgatttggatattcctttccatggttggtgtcactaaaggtgtgactattttggttatcttttcagagaatgcgctttagtttttgaggacgtttctctactttttgtattagctgc

SEQ ID NO: 35487 - DNA, 1184 bp, Mus musculus
gagctcgggcgggatggtagcgcgttctctccacgcacacctgactctgctagaggctaggtcgtgacacctgagacaaacaggttaagcttagtagagactgcagcatcggaatcccggggcttggaggaagggagaattcccaggtggcacccacaagggttctgcaaggaactcaggggtctcgggaaccctgggggctggggagggcggcggaggcgcagagcgcggtccccgctggttgcaagtccagacccccgggggcacgtttctcgccgttgcacccggaagcgcctccgcccggcgcctcgggcgggacggaccgcggctgcccgcagtgggctcccgcccgctcctcgctggcccccggctcggcgctccggggcggacgcgcggtgcgtgcggacggtcacgtggcggcggcgcgcggggctaaatacgcggcgccggccattttgtgcgagaagccgcagcgccgcctccctgctcgcgccccaccgccgcctccgcgtcttcctgcgccccgggcttccgccgcttcattgatttccgtttctcgccgctgcagcctcctgacacggtgatccgggcgggccccgcgggaattctatcctctcaccggcctcacactagtgtcgcatgtccactatccagaacctccaatctttcggtaagggccagtggccggccgccgcccgcgtccctctgggctttgtctcggcgcccagaagatggcgacggggggctccccgcgaccctagcccgggggatgcccctctccgggcctcggacacggccttaagtgggcctgcgactccgtagaggcgagggcccgaccggcaggcgcttggggaacttgacactggcaggaagacaagggtctcggggactcacaggacggtcgggggacacgccagggctgcagggggacccgccagaggctggggggactgacagaaaggccgggggcttcagagacccgtaagggagctacagtacttgccagggctgcagagactaggactaggggcttgcagggaacctgacagtgacaagacgctgggagtctctggtgttatctctcttgtggcctcggggctggccagggctttgcaaggagactggaggggtggggcccagaagctggagaacctgacagctttagggtgactgcgagacctgtg

SEQ ID NO: 35488 - DNA, 1462 bp, Mus musculus
tgcccgccagaagtatgtccgaaaagcttgggagaaggcggatatcaatacgaaatgggcagccacaagatgggccaagaaaattgatgccagagaaagggtaaaggcacaaagctttgagttctggagggcgggatgtgcttgagatgtcaggggagatcagttgagttttgtttttcttttaacagaaagccaagatgacagactttgatcgtttcaaggtcatgaaggcaaagaaaatggtaagtcttcagatgtacatttatattggctgtagggtaatgagggaagagtagccagtccctattttgtggtgttgtgtgtaattgatgtttatagctcttgataggttagggccagcaagattgctcagggtaaaagtagctggcttaatgaccaaatgagtcttggaaataatctctctatagtttatgtgtgtggaagcagtttaatttctaacaatggacataaggcgtattgttgtgtgagtgtagcaagtgctcttctgtgttttttcagaggaacagaataatcaagactgaagtaaagaaacttcaaagagctgctatcctgaaagcttctcccaaaaaagcagctgtggccaaagctgccattgcggcggctgcagctgctgctgctgctaaagctaaagtcccagccaagaaggccacaggaccaggcaagaaggctgcaggccagaaggctcctgctcagaaggctgcaggccagaaggcagcacctcctgctaaaggtcagaagggtcagaagaccccagcccagaaagcacctgctccaaaggcggctggcaagaaagcgtgaggctacacagaataataaaggttctttttgacggtggtaaatctcatgtgtggactctaagcttgtcgccaagtgggaaatagactggtgggattgtagataggatgggctacttaaactcattctacccaggccttagtacttagcatacagccagagtcaaactgatcctttatacagggggtaccatgacagtacaacagtgtcgttaaccctaacaaataaatttcccaccaacgggtggaattccttcattttgatgaaccatagtcgagtataattgttgaaagatacgtggggctgggcttgcctgcctcgcatgtgtgatacatttggcatttcttctctttccacagcatgattttgataattttggattataaaacaggctttgaatatttctaggaaagtggatgattggagagaatcttggtcctcacaaagggtggactcctgaaaagcaggaagtgttatttgtgagaagtgggggtggattacttgcagggttattcccagcacactgggtgcttttgagtcttgttgtccacagtttacacctggacaggtggacactggaataccaggtgggaatgaccctgcatggggggagtcctgtcattgtcaacagcatttgtgggctctg

SEQ ID NO: 35489 - DNA, 1680 bp, Mus musculus
caccgtatgcctacaatctgtttctactgagaagagcttcctgacaccgtggctgctgtgtatttttagtgtatgccatggtgaactggcttttggtgtcggggcacatagcctagtataggtagcagaatcacggtgacctgggttaaaaacaaacttaagttttaatgacttgatggaatttttcagggtacctgaagctcagcgcacagctgctgtgacaccgctgcgtggacaatggctactcaaggtttgtgattcagatgcctgtctgaggatctgcctcatagccctgctgcctggccagactgcctttgttctcttcccttctgcacactaccactggcttggtgaaataatcagcaagccaccgatgggatctaatgagtgctctcaggccacccctgtcccatggagctcatactgaccctcacctgctctccttggctgcctttctaacagtatttcaatgggtcattgtcgtagatggcttcttcaggtagcattttcagttcactaacatactctgtttttacagctgacctgatggagttggacatggccatggagccggacagaaaagctgctgtcagccactggcagcagcagtcttacttggattctggaatccattctggtgccaccaccacagctccttccctgagtggcaagggcaaccctgaggaagaagatgttgacacctcccaagtcctttatgaatgggagcaaggcttttcccagtccttcacgcaagagcaagtagctggtaaagcatttgtgtttggaagctagcattaagtttcttgacagggctgtgtgacagctcagccacagcacaagtgggttgaaggaagggcggagggtagcggagtcccacatgcctagtgagtgttggatttacctttttcagatattgacgggcagtatgcaatgactagggctcagagggtccgagctgccatgttccctgagacgctagatgagggcatgcagatcccatccacgcagtttgacgctgctcatcccactaatgtccagcgcttggctgaaccatcacagatgttgaaacatgcagttgtcaatttgattaactatcaggatgacgcggaacttgccacacgtgcaattcctgagctgacaaaactgctaaacgatgaggaccaggtaagcagtgatgtaacttgcttttcagtttactttgagggaagttctcaaggggatgccaatggctgcctcacactaagttttggaaactaatggtgcctcttcatcctttattctaggtggtagttaataaagctgctgttatggtccatcagctttccaaaaaggaagcttccagacatgccatcatgcgctcccctcagatggtgtctgccattgtacgcaccatgcagaatacaaatgatgtagagacagctcgttgtactgctgggactctgcacaacctttctcaccaccgcgagggcttgctggccatctttaagtctggtggcatcccagcgctggtgaaaatgcttgggtaagagaatggccagggaacttgaagggtaggaagtagaagggtgctggcatggctaacaaaggctctcctcttcccaggtcaccagtggattctgtactgttctacgccatcacgacactgcataatctcctgctccatcaggaaggagctaaaat

SEQ ID NO: 35490 - DNA, 1113 bp, Mus musculus
agccagagttttgttttattttttagtgattttttttcatacattgttgtttcgcctgcatgtatgtctgtatgtctgagggtgttagttccactgggactggatttgcagacagttatgagctgctgctgagacttgaacctgggtctgctggaagagtagccagcactctttaacagctgagccatcgctctagctcgaggtggtgtattcttgagaaaggtggtgtgcctggatttgagcagaattgtagcacaggagtcacatacctgggaccccacttggagactgtggatcagaagggtccagagagatacatttaattgcaagctggctaaagttcttacatgtccggtaactcagtgatgaatggcactgttctctagcctcatgacttacagttccatctctctctagctcatcattctggccagtggtggaccccaagccttagtaaacataatgaggacctacacttatgagaagcttctgtggaccacaagcagagtgctgaaggtgctgtctgtctgctctagcaacaagccggccattgtagaagctggtgagtacacacattctgagatcactcacagtacttgtttgcttgccccatgttacttaaatttttttgtcagagacaacaaaaacaccctgctccataaagcttgtttctgactttgattctggtaaaggtgaggctgggcctcactagcagccctgtgaatctagacaacagcttagtaccagagaagtggtttcgtttggtttgaggtttgttgttaaggtgttctccccagtgatagaagagaaaatacatggtttatgtccaggcttcctttcagtaagcaactaatatctgcctaggcttcagaaccaagtagaagcggaaaatgatgaaggcatcatgtagaggacggtgctgagggtgagacacagggttgtagcaaccaaccatctttgggccgttgggaacacttcaggttactgaggtagttgctaacagaaaccatgggcctgagagagacacatggtggcttgtttaaatgtaaagtttatagattgataaagtccataggtagccgggatagttggaaatggatgtgtgtggatgcc

SEQ ID NO: 35491 - DNA, 1099 bp, Mus musculus
acagaaagtctttgaatcactttctagtagtcctccctagaagtatattttaaaccccacagtcagctagagcccaggtctcagtgtgatgcaccctgagtgcagtcttgggtttcagagagtgagtcatgtgggagcgagtcagtaggcatcgtaacgtgttctgacctgagcccttgccatttccctacccatcgcatctggaagcctgttcccacaactgcctctgtctgggtaatggcggctttgctagtccagctactcatgctcagactgccatttcccactgtactcagtgatggagcatctgtcagtgtttattcctgcacctgtatccttggaacagccattgtctctcatactgtagatattcattcagagagtgagtgcttcaatgctacatgcagtttgaggtgtttgtcttctgtgatcttatgtttataaacactcaggtgtggttttgaaattttatgtccttcttgtacccatttatatagactgcagatcttggactggacattggtgcccagggagaagcccttggatatcgccaggatggtatgtcataaagcccttgtccacgcctggaacctgggttggaagaagtggtggctgcacttaaacatgcagtctgaattccagagtcagcagcagtgtggagcacagggagcttggccatggcctgctgccaatgcatactcctgccagccgtcgcctggcttttcgttggtcacacaacccttcatcataccttttgtcttggagaaggaacagggagggtatgggagtacggtggtctaggatgggtgattcatagctgatctatcagagttttttgggaaattaccaaatttgagctgcataaggtgctgttgctatcatcactctatcccagaggctttatccaaggagctgtgcaacaccttggcttctcatctgatctgtgacaggcagatcagactttcattctcaggaggtcaggcacagtaagctgctgccactgctgcatgctctgccgggatcagaatcaagtgtgaaggcacactgctgctggtgtgtggtagatagtctcaggaactgtgtgaggcctggctttgtg

SEQ ID NO: 35492 - DNA, 1599 bp, Mus musculus
gaaagcagtgttcctggcaagatgtccttaccacagttaatcagtctctcctctttcctttgcccatcttgtggacaccctgactcctacagatcccagctaccgttcttttcactctggtggatacggccaggatgccttggggatggaccctatgatggagcatgagatgggtggccaccaccctggtgctgactatccagttgatgggctgcctgatctgggacacgcccaggacctcatggatgggctgcccccaggtgatagcaatcagctggcctggtttgatactgacctgtaaatcgtcctttaggtaagaaagcttataaaagccagtgtgggtgaatactttactctgcctgcagaactccagaaagacttggtagggtgggaatggttttaggcctgtttgtaaatctgccaccaaacagatacataccttggaaggagatgttcatgtgtggaagtttctcacgttgatgtttttgccacagcttttgcagcgttatactcagatgagtaacatttgctgttttcaacattaatagcagcctttctctctatacagctgtagtgtctgaacgtgcattgtgattggcctgtagagttgctgagagggctcgaggggtgggctggtatctcagaaagtgcctgacacactaaccaagctgagtttcctatgggaacagtcgaagtacgctttttgttctggtcctttttggtcgaggagtaacaatacaaatggatttggggagtgactcacgcagtgaagaatgcacacgaatggatcacaagatggcgttatcaaaccctagccttgcttgttctttgttttaatatctgtagtggtgctgactttgcttgcttttattttttgcagtaactgttagtttttaagtagtgttatgttctagtgaacctgctacagcaatttctgatttctaagaaccgagtaatggtgtagaacactaattcataatcacgctaattgtaatctggagacgtgtaacattgtgtagccttttgtataaatagacagatagaaatggtccgattagtttcctttttaatatgcttaaaataagcaggtggatctatttcatgtttttgaacaaaaactttatcggggatacgtgcggtagggtaaatcagtaagaggtgttatttgagccttgttttggacagtataccagttgccttttatcccaaagttgttgtaacctgctgtgatacaatgcttcaacagatgcggttatagaaatggttcagaattaaacttttaattcattcacttgtgtcattttgtttgtttgtcgtgagatggttgctcagggtgatgaaggcgcccagcttgcccaggggaaggaaggggcgctgtcggggtacccgggctgtctgggtagagaaggaccaagtctggatgggagtgctcggtgacccttagcagtgtcacatcaaaacccaggcaaaccacaggaaggaagcctttgtaggccttgaatattgtcactggctgactgcacttctgaccaaagggctgaggaagcctgtgtaaccagcccttcagctcaccctctcgcccaggagcaggcaggcttc

SEQ ID NO: 35493 - DNA, 1117 bp, Mus musculus
tgtggtgagatgaacaaatactgagcccagcaactgaattctgtggtccgttccttttcatttggggaccgagtctttgcctttcctaactttcctgtgtctggatcatagattataaggcttctgcttgaagttgctcctcctcttcttaacatccgtgagctggaccagagaaatggctcaacaattcagagcactggctgctcccccataggacctacaacacatacacgtcacacacacgcataccacccacactcacacatatgattatatgcatatcacatatacataccacacataaatacacattacacacacactcataccacatacattcacacacagatcccacacatacacatcatacacacacacacacacacacacacacacacacacactaatatacattccacacacattgcccacacatcacatatacatacgtgggtgcacacacatgtgtgttggagctaggggattcctggcagaatggagaggggtccaggctggtgtaaagtggtttaactgtgagttgctgagtgtcaaggacagagctactcagcatctagggagaagagagtagtgggcaggtgacacaggtgtctttgggaagggtaggagtaagcagagactgaataatggaagtggatcatgggaactgtgcagggagaggttcccagagccagcaaatagtaagtggcaggactaggcagggccattgtgactggctgaggcctggagtccctagggaggtgatatggaggcagagggacctggtggtggtcagggcaaatagacacccacatcccactttgacttgcctggtgagaacttagattatgatcagagtatgataggaagttgctcaggggagcaccatggccctgttgctatggagagccaggagagtgaggcagaacaggctccaggaggaggacttcagagggagggtcatactgcaggctgtggggactcagggcatctggctgtggacaccgagagcctaatgtgaggaccggatccatgtaccttcttaatggagtttgtgatgtcagagcgtgtttacctttagtggtgatggtggtttgacagtaggtgttctgtgtaattg

SEQ ID NO: 35494 - DNA, 1129 bp, Mus musculus
aagttttgaaatgcttattgctgctattagcagcacaaccggctgttcttcgggtctgacaaccctgccttttctctgaaaacatttgtgggttgcctaaggctttctctcttcctttttttttttcttttctttaaatgtccctttctgccctgtgtgagaagagaacagagagtcttacctttgtgaatactctgtcctaaggcacatccccggcccttcaatttatttatttttatttttaaaggtttgctatttttatgtgtattagtgtttcgtctgcatgtatgtctgtgcactacgtgcatacagggcccattgcacccaaaagagggaggtcagccacctggaactggagttacagatagctttcagttaccatgtggattctgggaatcgaacccaggtcctctggaagagctaatagaccagtgcttttttcttttttctttttctttttctttttctttttttttttttccgagacagggtttctctgtatagccctggctgacctggaactcactctgtagaccaggctggtttcgaactcagaaatccacccacctctgcctctcaagtgttgagattaaaggcatgtgctacaactgcccggcttctttacttaatttttgagacccgggctcactgtgtatctctggatggcctggaattcacagagatccacctgcctctgactcctgaacattgggattaaaatgtgtgtgcctccatgcctagcatagccgtggacttttgagacagggtttctaagtagcccctgctcatcttgactgacctgacttgcaacctccccgtccctgcttcctgaacactgccatgaccagcatgcactgcaccatggcttttctgtgtggatctagtccttatctttacagtctgagcgtctttttttccttttacgtcactactagattatggcaggaaccatggttggatgctgagtggcttgggcgagtgcagacagccttgtcttgttcctgatcttaggagcagatgttctgtcagctgtgatgttgcagaagtcccgttaagggtgggaaaatgtggctttctgattctggtgttgaattttgtcaactgctttatcactgagatggtcatacac

SEQ ID NO: 35495 - DNA, 1160 bp, Mus musculus
ccccttcccctggaccccttttagttcccacacacattcatctatccacccattcatccatccatctattcatccatccatccatctacctacccacccattcacctactcactcatccatccatccatttatagattcatctattgtctaccaattcacctacctattcatccatccagtcatccatccatccatccatccatccatccatccatccgagtcaatggtgtttccatgtgctggctctcaagtagggagaaatattaccaacgatttaacaaataaagcatttttgcctccatgtgcctggttttcatcaacttttcctgcgtggctcctgcacatgtgtggccaaggttattgctctttaacaggcatctagtacctggatggcgaactgttaatactcttactgtttctgggcatgcccatctgacactgaaccctgttggctcctccaggatgcacagggttaagtctgcattctccctcttgcctttcatagaaagagcgggatttggagctggctgcgaggatcggtcagtcattgttgaagaagaacaagaccctaactgagaggaatgaactgctggaagagcaggtggagcacatccgggaggaggtgaggactgctggcctggaagtagtcagggagatgggtgggagtacgggcaggtgtggcaagacttgtactcaagagaacccagacttgacatgtagaccttctctgctgggtccttagaactagcaggtgcaggagcagctgcccttcttacactgtgttaagtacaggagcggtgcaacattgtggcctgcagtcttcattgtataagctcggtgcaacgttgtggcctgcagtcttcattgtataaactcggtgcaacattgtggcccgcagtcttcattgtataaactcggtgcaacattgtggcctgcagtcttcattgtataaactcttcatttcatggtgctcaggctgtcaggggagaggacagctgtggactatttcaccatcaccaaggggagcctagagtcaggaggaaggatgctgactccctggaagtgatgtttaaactgcatggagacataacagtcagctggggttgccagaacagggatttggaggtcagagcccagctgtccatggaggcttctctcc

SEQ ID NO: 35496 - DNA, 1658 bp, Mus musculus
ctgataaccagggtttagttgattttaaagcttgccagtgcttacagcagcatcaggagaaagaagaactaaacaaaaggtttagggttgttaaagaaaaatccatctctatataaaacgatcagcgcactcttagtggtcaggtgatcgaacagagtgggctctcatcttattgagcacaaagcccaaattagcgcaggactggacttctggaagtgcctggctggctcaatcacagtgaccttgaacctgcttgacacctgccacgaagccctaggctgtgatcaagtgtggtgtctgtccatccatccatcccccttgagctggaagccctccagtcaggctcagacaagaacaaggacttcaccaggaatttggggtagtcattccaaggagccctgccctttgtacccccaacctgaggcctgcgaggtaaacacaatgtggacttgcagttgagccgggcattgtgcttcggtgtgcagcatggtcttggtgactccggttctgaacccaagccccagctctgcaaagggtgtttcatgtctctcactgtcaaagcttggtggcttgaggattcaatgttttgcttcttctgggacaaacaggaggggctgtggggagtccttcccagtgaaactcactgtctctatattgtgtcccaaggaagggaggcacagctgcgtcccggcagtccgtggtgacaccgagagttcgagcacccaggcatcccagtggtattgtggaggggccgaatctctctggctttggctcttcggacaatcaatcctcttggtcttcaaagctgcccgttgttcctggggagtgggggggtgtgaatttttagcagccttctcctctctcccaaacccatttggatgggatgggttttccttctgatgattcaactccatctctaaaatgacctcctcggagattgcacacccgatgggttagggaggggcagctgcatatcctctccatgtgtccagatgggggctgcacttctgattctaatcccgccttgccttgttgggttgttattgttagtgttcctgctacagccattgtcttaatgatctgcctgcccctttccctctctgtctttcccaataacccttcctcccaggcttcctgttggttttgttcctggactttgtcgctgtccaagacttgtgattgtctggctgaccttttcttcatagcttggtccttttttgttggcgccccgcagcaccttctcggttacccgagctcaggagcctccgctcagatccaatgctaaagccatggttcacagaagcagttcccgtgcttcatttgcttgtgtgtctttctgtgcctcccgccaagcctctgcttgtggtcccagggctggctgccaccccaggtgtctgtcacccagccctcatgggacacacagctgggtcacaccaccagcaggcacgcggccaagctccccttctcttctggacaccatcactattttgtgctccgactttgtccccctgtggtgtgtttctagccgactctccacccactcctttgttttgttttttgtttttttttttcttgtttgcttcttttagtttttagttttattttaacacaaagccagatttttttttttttttaattttcaaacctaagagaaaact

SEQ ID NO: 35497 - DNA, 2294 bp, Mus musculus
gatcataagcacataggcacaagcagatgcgggggcttcagggtcctcttagaggggccgagtggagagagaaaggccagggtttcagagatccttagcagaaatgggggaggctgctgttctctgcctttgttgtggcagctgggtgctcgccactgtagcattgctggagatgtggccctgtgcacctcctcctagagagacttcccaagttaattactgccccaaacctctcttgagcacctaattagagcacggggcctcattttatggacaggtattaagtaggtgttaacactcaaaagctttgtgtaactggcacttctctgtaaagctgctacggcttgcttctgggtaagagcccccgtatctccagtgtgggtatctggtggtactcaagaaaccatgttggggttcacccctctagcttgttcttggaatatacccaaaatttcatgggttgactcatgaggctccacaagtgataaaccctgttttggtagttttaaaaggagaatcctgttaaaattgttggctgttactggtaccctatgttaatcagccaccaggtgtcatttcaggaacgaggctatgtgactcaagaactggattgaaaaagtatctccattttaattttctttccttataagagaattttctatttttaatcaaatctttattgtctgggtatgaatgtcgtattggcagcttcctcggacgtgaacttcagcctcacgtcaatgttgatctcacgtacgttcgtgtctactgtacaggcaaatgctcactcttcctgacacagaattttgaagtgggaaagaggaaagcagaagaggaagaaaattcttttaattcaaagcacacattcaaaaaaaaattttttttaagtaattaaaaaaaaaaagtcagcctaaaactgtattgttttcctcctgatcctgtgtggttctctgttgctctagatctggacaccgcacacactctagggtctgagcctgtggttgttactgacactttacacttcgtaaatgctagtgggagtgttacctgtgcttggtgacacggctcgggacttatcatccagacagggttccatactgattcttacaagtggaaggaaaaggcgtcctgaagggaaacgatgcaccgactgacagagtccagcctagagaagcctcacctccctggaggagggcagggaagacagacgccccagagacagacaccctggggcttcaggtacggtgggtggttcaggattaggtatttgtagcccagtgggattcttgatgccaggacaatctggttccaaggcaggcgtgtttctttgcctgtcgctggctgctcttccggaggatgctgcttgcccagcagctcacaggaaccggtgcagacagcctaaacggaaggtgctttcctgttcggtgccacctgtctgctgttagccggtgagcgggcttaggcagaaggcttttgggttgggttgctttttactcagccagcctcaccttgaccggaactctacctggcactccccttttggagtggaggcagctgggccatctgaggtcgacttccccctcagtcccagatgctgcacagaccccaccggagtagtagggttgtggttcttgctatccgtgaaccctgtcgacgtgcgtgtgggcctcttcctttcttttctagtcaccatgtgctccacctcccctacctgtttccgcccacctcctacattcctgcctccagatggagatgcaggctagagtctgtggagagacagaagcctcccatcagtgatggagagggaggcagctttggaatcccatcctctgccccaccttggctcagtactcaggggaagcagcgctttggtcgtcagcactgcttggggtcaagggccatagccagcaggccgaagcaggtggctatctggagcataggagttggcctgaggtggggaagagaagtggctgtccgtctgtaggtgccctgggtgtgtggagggctgcatgcctcactctcattcagtcctttactgtgctgcttcccgagggagccgcctgtaacagcaacacttccagctctctactgtgtgtttgacagggatgacatgtgtctgaggctgtacatggccaggggtactgtcagctgtgtccagcaaacacttggctaaactgttgcttgcatctgactgtctctcccaggtcgggggggccactctgcctgtgtgccgtaagagcccagaatggtggagaaagagaaaccagggtgcccttgagagatgaggtggggga

SEQ ID NO: 35498 - DNA, 1189 bp, Mus musculus
cagagaattgtttgatgagcccgaaagacttgctggcctgggttagtcttttgtagccaagctcttcccaaaggggcacagggtataggagtttgagagcctgactcatttttgcccatgagttttgcatatacttgttgagatgaattctcagtatgaagtgtcctctcttagcagattcttaaccctaaaatggccagcagctgttgacagcagagactgcgtcccaccttgtcttgagatgagctgtcactacttcctgttaggaagtagatttcaagttgtcattcccttataattggttcataacactttggtttgtttgtagttgtgtggatagtttttgatacccgttgtcccaattatgttcatactgtaattattaccagactaattcattccttggatttatattatgacagggttcatgttgtttttggactggtaatatctggttttgaagtaattgaacagattgaaaatctgaaaacagatgctgcaagcagaccttatgcagatgtccgagttattgactgtggggtgctggccacaaagttgacaaaagatggtaagagcctttggaggatggggggagtctggaacagagaggtgtaaagcatgtgtgtgggtagtgggagtgttgatgcctctgtgctgtgctgcatcctctccaccagcagatgtttccagctcctcctcctgctactacccagctgtcagctgataagacctctcatgcctggattattgtagtaccctcacagctgcctaccttacctctctccctgtttccctatggtcgtttgtcagcaggcatgtcctcactaatttctttgctcatgcccttggtttactttggtttgtattcagcagctaccagagtgatcctcttaagggacaggtaatccacatccctcaccccccactccccatccccaccccgcacagacactacagtggtactctcagcacagagccgcagctttctgttgtcttttcaacatttttccatactcattgccttccagctacactgatgtttattcagacactagggactttgtgcctgccctcatgtatactttaggtctctgttccagggtaatcttaagctacctatatctatatgtatctctctgttcccttgacatttgtttattctgtcttagctctcattacttgtcacgtt

SEQ ID NO: 35499 - DNA, 1613 bp, Mus musculus
ctcactgtggcaatagtagcagccctgccccaaccatcctattccctgtttgtgtcgagacaccccccacccccacccccacgctgccccctgactccatgaagccctgcctgatggaggaaacccaggacaaaagttgggggcagcagggtcacaggctctgctgcacagaaaggggttcttacggctttgtgtggctcctccaggaagaatctaacctgtaaaaactagtgtgggtttgtttctttgttttgttttactctttagtttgcattctttccccaagtgtacttaatcaccttagtgccggttaaatccagttcacagacttcctgtcaggtatatggtgtagaagtctgtactctcctatcccacccaggccttgctagtgcatttgggaagagtaaaggccttgggctggaggaaattactaaagccctggccagatggaggggaagtactggatatatgaaagtagtcttccagggccatgtggctcagtgatatatagcatgtgcttagcatgtaagtagctctgggatcagaggtcagcaccccacaaataaataatggtgttactctgtgatgtatgtaagcagcattttggtggccagccagctattgttcaccatgtctgtaaattagttaattagaaggataacatcggaactcagtgcttggcgggttagacatgtggtttatagtgagtgggtccttctaccccccccccctttaaagttgcctacaaagaagggtgtttgaatctagtattcagtaggaagaatgcattcagagcccaaataaactggcaaatgtaattagtaagaaaaggtcactattgggccatatattcttatttggttgctgtgtaacaagttatcccaaatttctcagcctaagagtgcctatgtgtcattgacaaacaggcaatggtagggttgactcatctgctcagggtctcaaggtaaggtctggaagagctcatttctcagaagactctgggaagacgtgacttgtagctgggcccctctagagccctcggtggatgcccacatcgcctgctgtaggccttgccagcttcaaccagcagggaccctttgagtcttgtctttttttcaaaacctctgccctcctcctgctttaagggtccatgtaagtagatcagactccagagataaatctctactcgaagtcccgtggccagaggaattacagacattgtcgggttctggggattagcatagcaagaggaagggcatccacctaccacctactgctgcatggacagggcttaacctgtaccagcaggcactcatgttcagtaatgtcaaccttgctgtttatactcgactgaatacagaaatggcttttcttcttatccacgatcattctgtattttgaagttatttttttaataaaattgaattatgttgtgtaatgtgcttaatagaaaatgctttctttattggatgattttgtaacatcctgtttactgcaagtggcatagttgatattgttcaaaaatgtagaaaatacttttgtacatactagcaatgtctaatttgtatatacttctatgaaatttctctacaacttgaaaaggatcttgtaga

SEQ ID NO: 35500 - DNA, 1195 bp, Mus musculus
ccgcccccccccaaaattgcttccaatgagctgctgctttttgtctgtggactatggtacttctaaacttttattttgaattataaattctaagcatataagtagatttttaataactaccctgactcattgtatactgcaactgacttaaggcactcaaaataaaataatagaaagaaaatccacaagttgattgtctctcttgttttacaggtatccattatgatgttgacaatgaaggccttatttccaacagatatactcatatgagaagacccacttcaagcacttttaagtatctttctgtttgttgaaccagcatggcagggttcaagcgaggatatgatgggaaaattgctggattatatgatctggataaaaccttgggtcgaggtcattttgcagtggtcaaacttgccaggcatgtcttcacaggtgagaaggtggcagtgaaagtcattgacaagacgaagctggacactctagccactggtcatctcttccaggaagtgaggtgcatgaaactagtgcagcaccccaacattgtgcgtctctatgaagtcatagacacccagaccaaactttatctcattctagaacttggagatggaggagatatgtttgattatataatgaagcacgaggagggtcttaatgaagacttggccaagaagtactttgctcagatagttcatgctatatcttattgccataaactccatgtggtccacagagacttgaaaccagagaatgtagtcttttttgaaaaacaaggtcttgtgaagttgacagactttggcttcagcaacaaatttcagcctggaaagaaactcaccacgagctgcgggtctcttgcatactctgctccagaaatcctgcttggcgatgagtacgatgcccctgcagtaggtaggtgacctacccaggaagctctgtggaacctgccactgctgttagttggttatgttggttgaaaataattccaaagagaattttgattatatatgtctttcttaagaaatttggtctcatgaatactgtgtgttcctaagctggcagacaggttatttcatacttataagggaaaatgtctaaaggtgtttttaaaacaaaggtaattagagtattgttgaagggaacctttcagggcattcattgtagctttttttcttaaagactgagtttactccctttc

SEQ ID NO: 35501 - DNA, 1231 bp, Mus musculus
ttgttgactcgcacatagctcagaagccagtgtattaaataaatgacaaatgatgtccttggacaaagtgagagtcttaaaatagacacacaggcaaaaatggagacaagtcatgtgccttcctgggattgctgggggaaggaatgtgctggggagcccttcagacggaccccagtcctggcttggtaaaactcagattttcttcccccatcagtaataaggaaagcttactaagtctgtagtgtaaccgcaaagtaagccagatagagtgcttagcccttgtgctaaaacctggcaaatcctgccaggccaccgttcgctctgtattttccattctctccagagaagtctttaaagcatgtgagtccttcaaatgtagctgctttccccagggagcagtctgttggttgccactgacctcatctgttttctaacaaactttaaagtctgtacatcttgtttccccaccagatgtaagaagcgtggcagaggtggaaagctttgatacatgtgttttatgatggtaaaaaagaaattattcaaggaaaagatgtaccattggcatcatcagttgagagatggtttcctgtagctgttgagcttggagcttcctggggaagaattactccagacataggctgtgttatagtcggaggaggggcactgagtgacgagcagccgggtcaaagcccagcctgcatatgtttttaaagcatcaactgctagtccttgacttgtgaattccctctattcattgtatctgcatattggatgtaagtagccactactgaatgctcatcatgcataggacacacctcattgttgttgcagacaaggctctcagtgtgctgtcaccagttcaccattcggctgcctcagcagccaaggccggctggggttatagacgggctctgttgagacacaccctgtgaaaaacacattcttaaacttttaattgctaagattggggatcctttaaaacagaataagctatgctgtttttcctactgacttacattgcctgggggtctcagagatatgacatgtgctaccatagacaagggattgtaacaaatgaagtggttgcaagactagggaacatggggttctagagaaatctctaggaactgcacgtttgctcatctctttctctcaagattagaaagcagaacacagggaatgtttgaattcaacaattattttaaataccacctaattaataggaaataat

SEQ ID NO: 35502 - DNA, 1178 bp, Mus musculus
gggaacagcgatagatgaacactgatgctcagcccaattcctcctctttattcacccatgggacttggtctcccagttaggctgggtctttctgcttcaattaatctaatctagacaacccctcgcaggcacacccagggtctgtctcctgtttgccatttctcgagccctttctatttttaataaaatcttaactctgcttctcactgactagccctgaaatccttttgtgtttcaaaaaccgcagacctcattttgcagcacagttcctaacagaaccagggaagtcttcaggccgctgaagatgatagcaagtccttgtagcatccaacggggtgactatcagaagccaccaaatctccttgtgtccaacacaatcacaaagcccgtgaggatggccaccagcaaagtgggtgagggttctttgtctctgacccggttgccttttggcatcttctatgatgctgagacagactgatttgttagctcacacatggataaaattcaaaactatgtgcatctcttggccctactgataacaggctctgctagttaagttacccactgggactgaaacccagcactgaccaggcaggtttctcctcaggtaagcactccaatggctctgtcccaaaaatatgttaggcacacagaagtacaaaaaagacctgttagccatttagcctgtcccttgctaagatgagaaattgaaaaggcaactagagccaaattgtgtctctggtcagtccacagatgtcaaacagtccttactccacatgacagaattgcagtcaaaacgcagaggtactaaagtagcacatttagccaggaattcaaaatacctacatgatacatccccatcctaacaaagagaggtttgtggtccacactacagggagaatgcaaaaaaatttacattattcctttccacacagatggagcaaatctttaaaatatgaaaataagcttctgtttttcattcctcagtgtcgacatgcaaaacatcagaacccttaatgaaaatttaaaggtcagtccctcttccatttatttctatttgatctgttgagacactttaaaccctgtgtaaaatctttgactataattgatttggtttaaaggttattgtcagatgttacatttcaaatgcaaatttgtataatcagaacaggacttct

SEQ ID NO: 35503 - DNA, 1197 bp, Mus musculus
taataatcgccttaaataaaggttgtccttctgatgtactgaaaaattgtgatttttcagctgagacttttctcaatttcacctaactgcttgttaggtgtttggtgttgcagtccgtatgccagtgtacctagtccatatgccagtgtacctagtccatatgccagtgtacctagcgacttctgggcctgtggtgttaggtgttgggaagctgcactttattttccttgcatgtatttactgtctctaacaactaacatagttaacccaagtatttttatgtaaaaagatttcaatttagaatacttcatttttgagatggagtttagaatatttcattttgaaatggaacgaaagggttaggttttgatgtaaaagacaggagtcaatcactagcgttaactttccttgttttcctgttttatgatcaaggccgtgtttcagcattttaaatgtgttccatggtgacatagtgcttacagcaacgcagttcctggggcccttctgtgtgtaatctacagggttctatgagaacatatgcatagactcagccattcaagtgctgagtagcccgaacctgaaacctgtcccctttccttccagtattcccaggacccaggatctaggtcccctcacttgcagggatgttaacactgttgcctatcgggaaaccaagtcccactgtgttctcatgagcaaccagcttacatggtgcttaaactggattgcattttaccactaacatttaaaactatgtggtgctgttacgtctcatggcgccagaaatgagatagaacttgtggttatttttattgaatattatgttaatctaaccacttatatacttgaagtaaaattatgaaaaaaatctattatgttgtttgaactgtttggcagaaaccaccattggatttataactttctgacagtgttaaagtgagagacaatttgaaactatgaaaaagctccatggaatagctggatgctgagaaagccttctgtctagagaacagagaacaaagagcattgttaccaacattgtttgtccaggagaaaagcagattacacaaataaaacctcgacctcacaaatcacgactcgatgacttgagctattacatttttagtgactagtcaggaaatttttttgaaaatataaaattatatcacatgtaattaactgccagcaagattagct

SEQ ID NO: 35504 - DNA, 1374 bp, Mus musculus
caaaagttaaataaccaaattaaaagttaaataaccaaattaaaaattaaataaccaaattttgcttaagagaaagattttttaaaaccctattgaatatatactattaacattgtctgatacaagtttactaaagcatcagtaacagagaacttaaatacatgatttcttctaccaattaaagtatcagtggagcatatacttggtgggcacaggcatcctcaagatgagtaagatgtaggattataacttagcctgaagctccttaaaaagctttcttcacttcttcagctctggcccaggcagagccctgtgctatggctcgctctcaggtgaagcatggcctcctttgtgctcagctgtctcctgcacagtgagaggcctgctctctgttcagagtagacccacagtacattagaacaaaggagatgctaaaatcagtttttcatgttttgggtttttatgaaacatcattaatttaaacagttcaaatgtatgttcaaaataagaaatggcttataaaaggattgtgtgtgccattgtggcttttgacccatgctaatgtgacaaatgttgctgtaaatactcttatgaaacagtccctaagtagatttggtggcacacatctttaatcccagctcttgggaagcagaggcaggtggatctctgtgagtttaaggccagcctggtctataaagtgagtttcaggacaaccggggatgttaaacacagagtaaccctgtctggggggtggggccgtcaaacctgacatttattagaaaattgcttggattgtaccgtgtctaatatcagctaacgtggaatctgctgtaatgtgtgttgtattggatttgtctcagaactaattgttacataataaagcaagccttggccaccacacagctgcgttccaggatttccagctgctgagtttcatgactgtagtggtaggacgttattagacgtgatcctttgcagatgattcattgcagatgtatgtcctgtctccacaacagagggtgcaggtgaagcctcgggtacaaacggtctccaaaggagcctgacactgtggttggtgtgcagtcacttgatcaaaagcatcaaaggcagacctgcctcagtctcaagcccagagggttacattacggtattgtttgccttgagactggccttttatataaagctttgtgggtcactaggagctccaaatggttgcagcccaattgttacagggcaagaatcctgctttcatttttggccctttgtctctatgtaattacctatttcctttgaaggagagttttccgtctgtgtggacaccttgtaaaacacagcagcatccagtcaagaagcaatgtaacgggtctgttattt

SEQ ID NO: 35505 - DNA, 1201 bp, Mus musculus
tcccttgggtggagtagatgagctcctgaagaatggaccaagctttacagaggtattgtttgcacattagttataatgtcgtgtctggtatagccctttgttcatagtcctgattatcctggaactttgtcctttaagctctcctgctcctatttcttttgaggactatgccttaactgctagtgtgacctgggttcccagttatgcttgtcactgcagcctgaccacttgggaaagctgtgctagggtgcatatgttgacagattttgcaaaacaagtgaaaaatgctgcttctccaatctgaaaaaaatgagtctgcacagtgcttatgttacctttgcctgggttcagttcctagcatctatgtggcagctcacaaccattggcaatcccagagaatcccatgctctgtcctgaattttgtgtgctccagacatgcacatggctcacagacatgcaaacaaaacacgcatacaaaatacattttaaaaatagcatgggtatgaaaacaaatctgtattttcaaattgcctctctgaaagaatctagttctgccaagacaggagtagaactgtattttaaatgggtcttgatcagataggttggggggtactttataaaacaggccttgagtccagtattgaatgaaagttgtactcaaaagtacacagctgctaggtacgagcccaattactgacgggtttgagtagtagagtgccagttgacagattctgattgtcttggcaaccctgtctaatcttgaacttggcctggaaagcacaggcttctttgagcatggcctttccactgcctgaggaactgaagttggggatggggataggcatatgggctgagaccattatggagtaatgggtatcagatggcctcttaactcacctggttagtgtggtcagttacatccttactgaaggatatcaaaccacagtgtgcagagaggaaaccatgtaggctttcttagtaatctcttagagaagttagtttttgaaagcttaagtatgaaatgggtggaataacgggagttcagatccccttgtaagtagattgccaggggacttggaaaggcttataaaaaaaaatgtgtgttctatctgtgtgtcccttcctggaccaatgtgaagaatgatgaacacgagtcaactcactacaacagtgtttagatagtgggacctacagaaccctg

SEQ ID NO: 35506 - DNA, 1173 bp, Mus musculus
tggtgtcaagaatgtggaaaaacctttacacgtaaaagaagccttttagatcataagggaatacacagtggagagagacgctttaagtgcaacttgtgtgaaaaatcttttgatagaaactatcgacttgttaatcaccagaggatccacactacagagcaaccacagtggcgtgataaagattttgttgggatacatgcccgttctgttgaccagagaaaacacagcaacacgctgcagtctgaatatggcctacattcagataagcctggcttatcttactgtcaggatgtaaggttaaatattcaggaactaagtggaaagctccgtaaagagtgtgataacccttctgatgagagttccaagtcaattgcattccagaatgtgcccaccaagaagaaagcctgccacaaatgcagcacttgcgggaaaacatttaaaaagcattcacatcttattagccacaagagatgtcacacaaaagagaggcccttcaaatgcatagtgtgtgggaagaccttcaggtggtcttccaatttgactcggcatatgaaaaaccatgttagaaattagcctggggtcttcgatgacagtgggggtggggaatagttcttggtcacattctagagaactttagtggtaggcactggggaaaacctttgtaaaggtccagtcctttttggcttggatgttcttggtgtggaatcttgatgatttcaaaactcaggaatttctcagtcttccttctggaaagagatgttgaaaaataacagaaagttctctggggtcttttagggattctggcccctaggtttagcccaggcctctgacagccaggtctccttagataattcttgctgtttgtgattattggaaagcatgtctgtagcctagtaagcgttgtctgttgggaagggcccatttagatccctagttcttcagggtcagcttgtgttggtgctgttctgctgactttaaaacctagaacttgtattctacatcagatgtctcctgggggcccctggttggggcttcagtttataattggtttttggttattagctatggtcctaaagtagtctcagtgtcaagtgaaaaggacagggtgctaggctccgttgcttgatctggacaggcagcattactccatcatttcagctaagatacaagagc

SEQ ID NO: 35507 - DNA, 1162 bp, Mus musculus
gtccttgaaacccagagaatgactcatgtaagttgacccctgacccctcagcatgtatgctgtgacacatagcacccagacacacaaaataaaaaattaacaaattcaggtatatctatttcttccactttagtgatcaaagtaatttttagctaatcccttttgccttttaatataaattgtagtatcatctttacattgctcttctcctgccaagcatcttttctccttttccctgcagttctgggattaactccagggacttgtatgtgttaggtaattgttctaccactaaattgcattcccagcttccctcccatcctcccgagattctgataggaaataaactaaacatcaacttggtaagaattgatagcttttcatgctatatctcccaatatgtgactgtagtatggtgcgtctgtctgcatatttagatgctctttgaccttttttatcagccacttgtgttttctagccctatgaatgtgttaactatatttccaccctaggtctcagtccgcaggtgctcatgcacatgtgtcttctcacacatcctcgagaacctagagaacctacctccatcatgtgtgtgaacatcattttcttgtctcttctaggactgagctcaatcatgtgtgcggatatcattttcttgtctcttcttttctgaacatcagtgttggttgttcattcttttaccagtgacttctgatgacctagcaaataatgccacacactgcaatactgtgaagacactcgcaaggatacagcagtgatttagtgaaagcaacagatttcttttgtgttcatctgtgtgaccctggataggagtgatgcctccaggcaggtggcatgctgcccgctcagctcaggtgtcaagggaacaaggctgccttcgaatggtaaaagaagaggaggaggatggctatatttcaatgcagactgccaggccacagacacttaaccgccctggccaggagctattccgtcagctctttagacagcttcgctatcatgaatcttctgggcccctagaaactctgagccggctccaggagctctgccgctggtggatgaggcctgatgttctttcaaaagcacagatgttagagttgttggtcttggagcaattcctgagcatcttgcctggagagctccg

SEQ ID NO: 35508 - DNA, 1476 bp, Mus musculus
gagacatacctttcacagcatacaaaacattatcccagcttctccccctttaacatctgatcacttaaggaggtctctgcagatccagagtgggttctcttcctgcacttctccagttttcgtcccacggaatctagctgcatttacttttccaaactctgaaccatttctcctcagctcagccagataagcaagctctctgtggactctccacctttactgtgccttgtgatccagagtcactttactttgttgtctgttgtccagtgttgaggacttgttgcatatttttggtccagtttcctagttacttaagtaaatccagtttttgctactccatcatggctgactgatgattgattgaaatcaatttgaaattgaaataaaatagaaaccaaattgaaattgattgaactccttctgttcataaggacaagcaacaagatgatctgagatttcagctgtcataacacgaactgatatatatatatatatatatatatatatatatatacacacacacacacacacacacatactgtctctttgtcaccaacatttgagaggactgtgaaaggtgctgtagggctgtggggcggggtggtttggtaggcttgtttgttttctacttcacaggtgttgggttaaggtataggtggaagtataatctccagaaatcaagttctgtgataacattttgcttttaatttttgtgtgaacagaacagaatccttattgtcctagtctcgatcatcagagatttttgtgtgcttactatgaatcaggtactttaggtatgctttataaagcagaagaataatgcttattatgatagccaagaaagggcactgagagagatactgtgcatgaggcggggtagcagagaggctggcagtttgtgtctgtgggctccacatctgctcatcagtacacaggaaatattcaggacaaaatacatccatctgtatagaatatgtacagaattgttttctagtcattctctaaataatacaactgagtacttcgtaacatttataccatattaggtattataagtaatctgaaattttttttttttttttttttttttttggtttttcaagacagggtttctctgtgtagtcctggctgtcctggaactcactttgtagaccagactggcctcgaactcagaaatctgaactcagaaatctgcctgtctctgcctgctgagtgctgggattaaaggtgtgtgccaccactgcccagctttggagatcttttaacatatacaagaggatgtttatggaatgacaaccattttaaacatccacagaattgttaggtatctggagtcatgaagtaaatctgttgctaacaaaggattatatatgctattacatagtgtggttggggaatgccttatttagaagataatatttgagggctggaaagatggctttatttgattaaaacacttaccacctagcctgatta

SEQ ID NO: 35509 - DNA, 1214 bp, Mus musculus
tgatgaggtgacagagctagatggctttctctaacctgcgggactgtcctgtggttcttcgccatgtgcactagctctacctccttccctagcaaggctttgtggggctgtggaagtggcttagtggttagagaagttgctactcttccaaggacctgatgcagccccccccactggacatctcataactctgtgtcacgcgcacgcgcacacgcacacacaataaaactgaaaacaaaccaagccacagccaccacacgaggtgttactgaattagctcgttaatgcagtgctctccctggaactaagagacttctaagttgctttgctgtgcagatgagcagaactctagcagatagctcttgtgctgtgactttcttttctgcagtgcaaatacaatgcttcattggctgacaaagaagagagcaaggaattgatcaggagacaggaagtggatatcctggaactgaaagaaactcttagactgagaatcctctcagaggacatcgaggtaggtattaacgtggtactttctttttattatttctattctctctctctctctctctctctctctctctctctctctgtgtgtgtgtgtgtgtctgtctgtctgtctgtctgtctgtctctcccccccgccccgcccttttttctctttgagacaggatctcattgtgccaaccatgctgatcttgaactcacataattcctctgcctctgactttttttcaaaggatgactcagagggtaaagttacttcctctgaagttgaccatcttatttgaatcctcaaaacccacatggtagaaggaagaactgttttattgttgaaaaaccaacagtaaaaattattaagtcctattcacaaaaataaaatatatcagaatcttaaggagaaaatttagcaagtgttaggctgtcagagagattccaagtgatgtaaaagaaaacttgaaaaggaaagtacaaaattactatagacacaaaaattcatgtattctagttcaaattgtaagtcttaaaagttgatgaaatctgggcatggaggcacttgcctttaatcccactgtttgggaggccaaagcaagtgtacacaggaaggtccatgtcagccagagttacccagtgagcctgtcttaaaaggaaggacagagagggaaagggggaatccaggtataaacataaaatgcatacacacaaacaaacataaa

SEQ ID NO: 35510 - DNA, 2023 bp, Mus musculus
acaccagaacccaatggccttctctctatggcaactcctgagattctactcagcactgcagctgataagaggaggcccagtgtttctgggccagaggctgcttgcacacctgcctcttgctttgaataatagttctttggtctacctctgtggctagaggcgccaattttttagcaggagatcctagcccaaagccttggacaacgtccttcctctcaggtctagtgtgtaaaacaagtgtcacaaacactaactgatcctccatggccccagcatagacagaggttattctacaagcatgtaccagacatctgcacgccacagaggtgggcatctgggcaaaaaggagtcaggacttggggttttctggtttcaagaatgaaggaaagatgacaggttttaaattaacttgacacaagctgaaggtatttgagaagagggaatctcaattgagaaaatgcctctgtaagattggcctttacacaaatgtgtagtgcattttcttgattgatgtaggagggccaggcccattgtcagttatgccacccctggatggaagaaaaaaacatgacgggcaagttatgaggagcaagccagtaagcagcactcctctgtgacctctgcattagcccatgcctctagggtcctgccctaacttccctcagatgcaattaaccctttcctccccaggttgctttaggtcgtagtgttttatcacagcaacagaaaccctaaggcaagaatggcctttaaatacacaaaataccccttattcagtgtgtactgagtatctctggaacacatgtccacttagaattacagcccttgagagaggttgaccatcacgaagaggacccagaccaagaaggccaacctggatccatgaaattcagaggcaatgaggttaaattaagcagcatgctggcataaaagaaaatttaactccagaccacttagccatcttaaagttgccagagtttaattcaaagcatagtggtatgtgagcagataccttaacagcagagcaaagcacagactcccgagaacagggcaggatacgttgcttcttcagatgttgtcactggccatagactcttacttaaaaaaagggtctacctcccatggctcatccagagcaagagggcctcacgccagcgtggggcctgcttctaagaggacagagccttgggataagagggtgtagtgcctgacccaggaccagctccaagatgctttctataagacttccagcacagcctccaggcacccctggacttgatagaatccatggtctagatggaagatgcctccagcccttctatatctgggctctgtacatggttctgaatccagatgacggtggcactgtcttctgaggccacaattcctaaatatgtatttgaaatgtttgcctgtgacatgtgcccaggttctctggctccctggagctactgcctgtggtgacatcggcctttgagctctgtcttgctgggctggctcttgaatgtgccttcacacgcataatcaaatttaaccatccctgacctgaaagctaaatgcaatttagaaaatgttaacatgcttagccaaggctcagagccaatcagggctcctgcctccatctccatggtatcaaatgtgctacttgctgatgagaacgaccttctcggcatgaacctctttcacttgtctggaaataaacttgacaatgaatttctggggtccagctttcactggggtgcattccatttggaaagtgatggtctttccaggtggcactgtcctagaaaattcaaaggcacacagtcagccaaaagtgccacagagagaaaatcgcattgcatgaggaaccaggcaggcatccggttccagtacagatcttgggaaatccctgtgctgcagagccactgaagcaggcctccacctggagggtggccacttgtctcagctgtaagacaagatggcctgctggaatggctgttttccagctatgccagtcacaaaccctcctgagagccctcag

SEQ ID NO: 35511 - DNA, 1189 bp, Mus musculus
aagacaccaacagtggctgctaccctgatgagtgttaccaactctgtcaccccacacttttttttccattaggattggggtcgggggataggaagggcaatagagggtacaggagagtagggactttctctgagttcctcttaacaggatgtgccaaaagtgatccagcaaaggaaatggtgaccaggatgtcggggtgggggatccacttctgcttcttgagggctgtcttggggaggctggggatcttggggaaggaatgctctaacatcaaggaagaccagcctggaaggctaaagagactccagccatttccaggaaagggattccttggctggctgactcgaaatcaacaaaggagggtatgctgagcctgcggtcagggcttgggcttggttgaaagagcaccctacatgcatgcatgcatacacacgtacagagtctacccaaatggaaatgagcctgagtcatgacagtatcgccatcctatagatacgagactcttccctgagacaacaaggcagtcagcctttctatagccacaagcatgcatcctagaagagctaggtgaagacatatattgaactcctggaaaaagtctgtaagacatggggacaggtgcaaccagaaatggcctcctttgcattttagagcagcgcccaaaatggtgcctcacagaaaactgcattgctagtcctaatgacatgccttattcccaacatttagagctggcaactaaacctctgttgctttgaggagaacctggtccacatggttctggctacatagggaaaccctgtcttaaaaacaatgaagaactgcatggtggccaggacatgcagactgttaagccaggaagaccccaggcactgctctcccaggatgagcttggacctagtctgtccactggagcttgaggtatctggctgttactgatagtctgggcaggctcctgcactccccagtccattgcagtggtggctgaagcggcagcttctgcagtctaaccagttagatagtctcaagaaacacacccagctcaactcaccccttgaaccattccccagcgtggctgccactgaccctggcagaggattgtatcacagctcctctagctctgcaaaagggcaggagtcctgggccagtggaacctgtgacctccatgacacgagtcaatcgaggtactgtc

SEQ ID NO: 35512 - DNA, 1142 bp, Mus musculus
tttctctacctgccttttgtcttcagggattccacattctactacttgtctctaccccatttctatcagttcctcagtcttaaatttgtcatgacctagatttttttaattgagaataaattcatataatgtaatacaaatcatttaagtgtatagttggttctaagacacttaccaaattcaggataaaccacttctgtctcattccaaaatagttccaccacagaccttggccctggtgaaaactgtaggtcagttattgttgtcaactgctcttgtgtcgggttaggcaggaggggcactggcgtgttacatttgtggttccctgtaactggaaacacttgctgctgatccacttgagtcttggcaattctgaccttgatggttgtgttaagtccattcctggaacgtttccctgctataaagtgaccactggcaccttccattattgatgtctcatgaagagagcacatgagatcagattattggttattgggttttttggtttggtttggttgatttaagacaggatctctttccctggctgtcctggaactcacagagacccacctgactctgcctccacaatcagctaaggtcagattctttaactgatagcttttacagaagtcaagaaacgtaagtccctgagatgttatgggaagagtgctagagtattggtatagtcagattagtctgtgtgtctacctcttccttacaaaagggatatgccatattccagttacaggagaaaattgcatgaaagagataaattaggaccatagaagtcttccttgggggtagagggtcttgagtcatgattgagtgcatcgatatctgtctgggaaactcagaaaattcccttagcttgtggaagaggtgaagaaagcagaggcctggctgggggctcagagcctttgtaaggatgaatctggaggtctgatctctgtgtatctataactgtttggggctttttcctacccatcaccttctttctgtggcctgggggccgagtcacagtcagcacccacagcaggtgagtggtcagcttgggagaggtcatgtggaatgtccactgcatgaacccacagtggcctgtgcaccttctggtgcccactgcatgtggcatctttgcttcccct

SEQ ID NO: 35513 - DNA, 1200 bp, Mus musculus
tcattttccactgtagcttcactgacggggccaactggttatctgaagccaagtatggaggagcacgtgtgcaaacccagcgagttcggaactggaggcaagagggtcagttcaaggtcatcctttgccatacagagagctcaggattaacctgtggtacatgagaccctacctcaaaaaacaaagacttcataaagagccaggtctatgtgtctgtagacccaacactcagcaagttagggccagaatatgccttaagttcaggagttcaagaccagcccaggcagcacagtgagcctctgtttaaaaaagaaaaggaaagaagccactgaaccgcttgttctcccaaacctggcccttcaactcccttctccctcctctacgctcccacggacaaataaaaacaaaggaacgatgactggtacttctaagatggcatgctagaaaccctctaggggaaaggcgccattaactctcttgtggaataaaggacacctggaattcttcagctggggtgatggagttcagcacttgtctaacctcagtgtgtggtctctgtagaacatgatcacctactctcatggtttctgtaagcactggataaaaatggaaggtagaatggtatgggcgggctttggtttctgtgtgtgtaacagctgcacaggagctgtgatttttccagtctgggtcaccaatgtctgcccctgcccctttcttacaatacatgaccgctgcgtgatacttcagagtactttggttgtgagtctgtgcatcttctgggttgcaacaggaagacgtttcgtgctgtgggctgcagtagaagggtatggagctgctgctcgagagagttggtatcatctgaccagctctccagagcttgctgtggggatgctggccagcttatctgctggcactggggtcctattccaggagtctcacaagccctgaactgatgcctgtggtccctgccacccttgggagccttaggcctcacacattcatgctggggtgttggtgcaatgttcaccggtcagactctacaggccgttcaggtgaggccgaggcctgctcacttgtgtcagtcactgttcgcttgagcctgacatggctcacacctgtgaatctcaggctgcagaactttgccttctggacacctttaagtctacaactcttagaaaaagaagctctggggtctgtttt

SEQ ID NO: 35514 - DNA, 2902 bp, Mus musculus
ctttcctgctttgaaaaggaagtgttcgctctggtcacctgaggcatgtggacatccctcccaaaactgcagagatggagcgcttgactgaaagtgtgattgttcttgttttcagggcatagaacaattgaaaaaggaagagagaagatgggctaaaaaaacaaaatggatgaacatgaaagccgtgtttggccaccctttctctctaggctgggccagcccctttgccacaccagaccaagggaaggcagacccgtaccagtatgtggtctgaaggaccctgaccagcattgccactcagaccacatcatggcacctcccatccgctcttgtgaatgtttaggccaaaactcttaaaacttttttatgtcttcagaaaaatggctgagcattgcagagaaaaaaaaagtcctcatgttttatttttaaaaaaaaaatcatcctttcaattttttgatgactggagctgctcttttcccttttaaaatcacttctctggcctctgtttcctctctgctctgtcagcatgactaacgtcgagggtgctgctcaggccctgccccttctactaattgaatgcccctgatgctgtgtatggatgaactggcccagtaggaaagccaagagggccctgacctcctcctgcccacagggcagcactggcgcccgcaggactcagaacctcttcgaagataatgctaaccccttgaagcctaaggatgaaaagattgggctggagccatcataagggtccttggtgcagtggcctcctgcccaagtggacagttcgcctcagtttcagaaatcgatgggtgtgggtgtacagaatgacttgggggaggtgggagaggtaaaggggcctttgtattctgaatcagcaattatgtcactctggcttttgggaagactatgaaagagatgtttcccagttcaaaaatgccttatacaatcacaagaggaaaacaatttcaggcaagctacaacaactttctaccccagttcccgccctttcccagcaagatgtcagtcattctgagggaaacagacaacctcctgtcaggatcatctcagttttaaccgtgtcatgagcatagactttctggagttgaaagtcctccagatgtgcacagacctgtgtcttatgtgtgtttagtctgggaagtggttgtagatgttaggtaacattcttagagttgccaggtagcccctactcacctgcttctcagcctgctacacagacaagctttcccatcagcaggtactgctaagcaaagtcacacagggaagagctggtcttgagctagggaggaaccaggggatgtaggaggtgctaagagaagactgctcttgaaccctacagccacgtggaacctgagcaccatgaagtcccccaaaccagtgggttttaaagcaatcaccacaaaactccctttttagcttttgcttggggtgggggtggggataaggtttttcattctagttgtgggtaggaagaaagttaatgtagccctgtggtttttcagaagtcggtgggacgttctgcctcttcccaactctgtcagtgcttccacatggaaacaatgcaataaaccttttccaaacctgcttctgctctgctctctccccacggcctgtgcagaagggcaggtggtgtcaggctgcaggctgagggagtttagttttgttcttaaaggctatggatggcctttctgcaggcagaattctctgcatgagttgctggtgagggtgccctatggctccaagaggtcagtctttctggagtctagggccagagcctgcccagcagagagcaaaagctgtgccaacagaaagtgcctagcatctatacccacagtgcgaggtgctgtttttctggggggttcttgttgatggtatctagtgatgacagatgaggcaacactgaggaactggccacctcccctacctccgtaggctttgatttgcctcggctgtgccgtttaggctgagatcctgggtgtgtgctcatgtggagttttacacataactatatatcgacatagataggtttagatgaagttcatagcatttgttctccaggtgcctttgaaattttgtttatttatctcttggtttatatgaaagaggtgtggcctgttccaggttcagcaggttagaagggtccagctgtccagccttgctcgaatactcaggttagatctgctgtggcaaagagcagctacactgcacactgcagctatggttctgttgtcaacatattcatattctctctctctctccctctcccccccccccaagactggaactaaggaaatagcctttagcctttaagggcattttgtgaatggctctagcttttgctatggggtttcacagtagatggcactgcaggaatttgaatcctgaaattaaagctcacactctaaataggcatgcgaccagcttactgcccaggcccttgtaagtctccctctgcattattacaaccaaaggctgcaaagtggaggtccttagtgctcaaactacagcaaaaaggcctcaagacaggactaccctagggtggcctgtgagtaccattgcattctctctgaagccaggagaatttttctgtgagcacagtagtgaccaaggctgtgtgtcaacaaatgactctgtcctgagtcttctgatccctttagatggagtaaaaggtctttctccgtggcctactggaaagtgagcctttgtcgcccatcttccagaatggtaactgggtaataggagtgaagaagacatggccagtagactgggtaacccacgtacttgtccatttcttcatgtcatatctgcatatttgcatgagcttggtgacatgtatacagtagaaatgtgtgcccagtctttccttaataccattttacct

SEQ ID NO: 35515 - DNA, 1195 bp, Mus musculus
cctgcaccagtggaggactacgctcaacaaaaaacagaattcctctccatgaggtagtaacggtttccacagccctgaggttcaaacagacaagtgtggaagagggaattttggtggggattgggaggggaccctgctggaaccctcaaggcactttcatcacaggctcaggtggctggacaggtgggaccttggtcttctgggagtttgtgcaattggagacacactttcaggaaggctctaatcaccagctgactaataaacaatgatgagaatattacatgaggctctggttaccctcacaaaggggcttcctctggcagccctgtgtgggctctctaaggtttataggaaattctgggagctagtaccttcaggtactttcctggcctgcctcactgcatctgtgtctgcattccacagctcttatcattgcttctttgcagggcaggaggactgttatttggccagtgtctgaagtcactttagctggagtctgttccctgtgagacatctcggttgcaaaagcaaaccacaacttgcatgcatctttgcatttcttaagaagtttttttttccgggctggcaagatgactcaacgggtaagagcatgactgctcttccaggggtcctgagttcaaatcccagcaaccacatggtggctcacaaccacccattatgaaatcttacgccctctctggtgcatctgaagtcagttacagtgtacctatgtataataaataaatctttaaaaaaaaagaagaagaagaagaagttgttcttctcctcctaaaattcttccataggatagatcctaacaaccagctcttgttccttctgccttgctggcctgctccagtttggggaagtggtgctctgtgtgaagcctccaacccctacgcacacaccctctggatcctatttgagttgttgtgcagcacaggtacgcaggctttgctccctgctgactttgcacagcagtgctacgtagagtctgggtgtattgtgcttcatagcttcagtgttggtgcactgctgggctcctaatctgaatgatcatatcctgagtacttggctgtgtgcagcaccatccaaggacctcccataaacttcctgtgtgccataaatcccaggtattggacgaatgggccacttaataggaagcaaaggcacagtgatgacatctgttgtggct

SEQ ID NO: 35516 - DNA, 1172 bp, Mus musculus
agcatgggaactagcacttgtttaacactcagtaaacagtgttgttattaaagaccagtgtatttaattcctctgcaaattataaccctattctcctaaactttagatagatacatttttttcttctcttccaaagtgttctaaaatttttaatcctgaatgttcatcatatcatcaagaaaaacctaaggttgaattggccatgtgctcacagatgtctgtcttccccaatcctattctaacaaaggcattttatgtgtccttgtcacagcttactattggcacattggccaagcaactcaccccaaagatgccctcagtcttggagccacactgtaacattatagcctccacagggcattcaccacagtgtattcccctgtctcctgtctcctaacaggccttggttaactgggatccagtggatcaaacagtgctagccaatgagcaggtgaatgaatatggctgttcatggcgttctggagccaaggtagagaagaaatacctccgacagtggttcattaagacaactgcttatgcaaaggtaagtggtggtcagaggctctcagtaatgcccagtgtgtgggtatagcatactgtcaactctgttgaaggagcctaagcagagtcctaagacatgggaggcagagagcctcagtgttgttcatgtacatacagggtggtgggcaagggtcctgaagttttaacaagaaagacacctggaggtcattacaattcttctttagtgagttgtcctcaaagcagcagtaattctatctgcaattatacatcgaaaaagggaatgagtctttgtgatgctccatagggcttgagttaaagtttctctgtgccatcatgtatagtaacccagaagtaaagagctaactggtctccaagagggaagaccagggagtagcagtaagctgggccaagtccagagctccagatgtggctctctgtgcctctgactgtttgtgcaggttgccctgggcctcagtttcctgataagtaagttgagcaattagacccaatgatgctccaagtaccttctggctgattctatgttcagagatcaagacaaagacagccatggaaacagagttccttagtaagtcatagtggcctggacaaagtcctgagttctgtatgtatgtaatactcagtgctgctgt

SEQ ID NO: 35517 - DNA, 1259 bp, Mus musculus
ctgtggactcccctcactctttctgttctttctctcctcagatcaacaacaaggcctgtggcaagatccctgtgccccagcatgttgcccaggaccaggacaaagtccatgaacttgttctccagagcgagctaggcatgaagctgctgcaggggagaagcatcaagaaggccttcctctcccccaggactgccctcatcaacttcttggtgcaggagtgaccagggcttctaggaccctccttctctgcccagatcaagggaaggaatgttaacgtgggaaaaaaggcaaacatcagggacattggcctttgtgccaggaccagcaggagtcagcaggaggcctaaggcgagctcagggaggacagaaacctcccgtggagcagaagggcaaaagctcgcttgatcttgattttcagtaggaatacagaccgtgaaagcggggcctcacgatccttctgaccttttgggttttaagcaggatgtgtcagaaaagttaccacagggataactggcttgtggcggccaagcgttcatagcgacgtcgctttttgatccttcgatgtcggctcttcctatcattgtgaagcagaattcaccaagcgttggattgttcacccactaatagggaacgtgagctgggattagaccgtcgtgagacaggttagttttaccctactgatgatgtgttgttgccatggtaatcctgctcagtacgagaggaaccgcagctagcttgtgtctccagtgtcttttaccatcacaggccctggctctgtgctacctccctagaatacctgtggttcatcaccttcagctcacactccattcagacaatgctcacttaggcctacaagcaagggagaggcttaagcacaaggtctttaagcttgatactgtgcctggtctcaatgcctagaaattccaacttaactgtcgctatcataaaggattttaaatttttttacaagtgagaacctagcatgtcaaggtcctaggttccatctccaacacgaaaaaagcaaggcaactctaccaaagaaactaattacatacttgtattcccaatatgtgagaagctgaggaaggaggatcatgagtttaaagccatccttggttacatgagactcttgtctcaaagaactaccagggatcctaatggacaacaaaggttgaaaaccattgaattaataaatgttgtgaaccataatttctacccagtccttcttccttcattttcatctcatctgggataagttt

SEQ ID NO: 35518 - DNA, 1144 bp, Mus musculus
cttggaccctccactgcggaattgaagttggaagccctcacccagcgtctggagcgagagatggatgctcaccccaaagcggactacttcggtaagtaagatgctttggagttgcctgtggtggagcgatggtgtccccaccaggatgctattatttctccttcctctttcagctacttctgctcctttagaaacttgaaagcagctgcgggcagaaagcagccttttgcatatgggagttacccatgtgagcagagtgaagcagggtgggattgctcataactgccctcaaaaaagggaaatgaagctgggaggtggtgatgctcgcctgtaattccgacacttgggaggcagacgcaggaggatctctgagttcgaggccagcctggtctattatagctagagttccagaacagccagggctacacagagaaatcctgctttgaccaaaccaaaccaaaccaaatcaacaaacaaaacaaaacaaaacaaaaaagagggaaattctgtgagtttgtgtttcaagggtttgaggtaccacctcaagcttcttgcagtgactggcttgagctgaccaaatttgtggttgttctacatggtataaatgtgtgggatgtgtggcttttgtttcttgtcttctgttcatatggtggttctgcaggtagccatggaccagcatcatatctttgcctagatgctggttacaaaaggaaatcattagcccctccctggatctgctgcagcaggagctcagggtaagatcggagaaggagagagacttctgcaggatcacgataacaactgggccaggtgcctcttgactcagtccacacccagcaccagccagcagcaggcgatacccgaaggtgtgacctgacacaaggtgaaggtgcttctccaggcttttacccaaagttgcagatttcattctctcttctaaaaaaaacccacacactctttacagacgactggcttcgacttttttttctacacgatgtttggaggcagcaagaacgtggctgtattcctttgttgaaaacagttgcctgtctcatgggagcgggtggcttggaaagacagcttgtgtttaggagtctgtggcttttttcatcttttaattttctctctctctctctctctctct

SEQ ID NO: 35519 - DNA, 1136 bp, Mus musculus
gtggggtgtgtagatagaggaggaagaagtcaaggaagctgcaggcagcttagccactcacacggtgggggtagggtagcttccgcctggtcccttagagagccccacaaaacccccagggacaagctcaccaaatcccaggcagattgggataaagtagagttacgtgctggctggaacatgcggttctctctgaagggacattcctattacactaagtcagacttggggctgtttgtgggaatgcagaggcacacaaacgtggaccttcatctgtctgctctgtgcctctgttttcccataagttaaatgagcatctggttgtagtgaaaactgagttggctaatgtagctatctgagctatccagtgtggaagactgcagacgcgtagctgctaagcacatcaccaggtggtccgtctgagctgagaagtcctttaagcatgaaatgtactctggagtttgaagatttggtgtgaagaaagaatgcgtattagtatttctatatgagctgggtgtggtggctcaaacctgtgatcccagcgctttggagacagaagcaggaagataccaaagttcaaggtcaatttgcatatatatatacatatatatatatatatatatatatatatatatatcacataaattctatgtaaaaatgagacttttggacactacaggctaagcaaaatgttattcagtagtttcactcttggagtatactgtttggaaatgtgagatcatgctggcttgtctcaagtttttggaagcactcaggatagaatatggcagatagtgtgggtcccttactgtttaagatgtattactgtattctcaaaagtaccaaggcatcatcagttactttccccacctgaaagatgatgccaggtgatgtgttcagagacacagagtcttaaagattttggaattgccacccacgctgtgcaccggaggcaaggatgggaggagttcgggtgctgctttggagtgtgtgctccctagggaaaagctatagaaggtctcaagctgctgcctcacagggcagggtggagcaggtggtgatgacagcggagataacttgctggttctttaaatgtactcttctgttagtgagtgaaggcagagtcctaagactgc

SEQ ID NO: 35520 - DNA, 2262 bp, Mus musculus
cctgcacccggataaccctcacacagcccatggtgtgacttaacagttcagtccacttcagagctttagctcttctgagaatacttcaaacacttgactgcattgcagctagaaagaggctctgcatatgctttgtacattggagtttgcttggtgaaggagagccaagcttggacatctgggaggctgggtctccctgctgtgcctctgcctttcctcctgcacctaagacagtggggttggggcagaggcttgccctgtcctatgcagccagctcagagagaactggtgcaggcgccaggcttctcgtccatgcttggtgctgtgttttcattgcttcctccagtctgtgacattggagttgcttcctcaaggtgagtctgaggcttcctcatatccctgtcaccttgttcaactcatttgaacatgaccgttgggaatcccagtccatatcctgggagagagctacttctaaaaggaaagttttgtgtgtgagatctcagagctagcaccagagggagtgcccgagcttgtttcagcggacttgtatctctctggtcctcttctcagcacagacatttgcttggtttgaggaaactaatataaggtacactgcttttgtctgtttttttaaacgtcattctttctctctaccttttcccacacacaaaacatacctcacagatagttttcaccaaatcacagatcaaagaggaattcatccatcctattggagactgttggtgtatcagcagtggccgttttccaactcttgaactacagctaagcagtacagtcgcaacacaaggtcttctgagactagctgcaactgaagtcatgagttcactctggcctcatgtgcctctgcatgctggctcccgaggttgccaggctaagatggagaccacatgctgtcaatattaagaccacttctgaggtggatatgtggacatacccgtcctcccaacatttgagagcctgaagtttgtgaagaaggagtttaaggctgtcctcaactacatgaggtcatgatctcactcaaaaaaaaaaaaaaaaaaacttaaaagagaaagaaaaaaaccccacccagcattgaagaacataattaactttgcctatcacttcccgaggccagaggtcagtgtctccttggaagttcaaatgggtaaaactggaaaaacaaaaatgaaatgggtttccatctgctgtcttatcttcagggagtgtcccgtgacttgtggcaggaaggctgcagtgtcttacttcagcagtcaggctgggtacccagcagctggcttgggtggtgaagcaaggccggtagagctcctgccacatgtgaatgtggactcttgactaggcctcagctagacctggtagctactgcaatcctgctgacctccattgcctatgagaagttcagaactagcactgtggatcaggagcatctttttcatttttatcaggttccttctgttgggatcctttggccagatgttactcgtttcctgttctagacagaggcccccttaaaaaaaaaaaagctatgaatgtatggggtcaccgagatagaccctgagaccagcgctgttttctctctttggtttcccgggctggctttggcaagggtggcagggaaaggagaaaacacaatgtctttgccttcctggaggctctggtagagtctaattttgtgtcaagatgattgatgaagattgcagtggaattagtgtctgaggtagatgggatttgtttgcaaattgaataatttaaaactctgtgattaatttttaaatgaaattaaatgaaattcctgattgaagtgattcagatctgtttgcaaatactacattttatattatcaaaaaagcaataaagaaatttgtagacttcccagaacccccaagactgtcttctttgactgtttgctggagaaggcaccactaagggtctcattgtttctctctatctcaggcctgtgcaataaaacatgaagatatattcacttatctgggattttaaatgttctataaattttggccagatagagctgtaaggagattatacttatagctatgtaggagggaacgaagggaggtggtagggatgctatgctttgaaagttagagcaaatagccttttcaagaatcctgtataactcttgtaccttggataaaaacaaggagatggaggcaatctcacttccagggctagcctctgctatcaccctccttattctgaccataggtttcagaagagccttca

SEQ ID NO: 35521 - DNA, 1139 bp, Mus musculus
aaaaaatgttcttttcctattttctgtttgcatactcatccattttaaaagagaaaaaacgtttttaaatgctttttccaacctttgcttcagaaggttctgattctattgtttgtcagggctaagaatttttgtttgtaactcagattctgatagattcttatgttgggccatggtgaaataatcatgttaaagggaccttaggaaatatggttggtttccatagcagtaggccccttcactgttctctctgctcttctctgtgtgatgacttctataaaaggctgtttgagaaaaggggctattgcctcaactagcaatattcccatttgtgtaggaaaaaaatgctggactgtccactccatctgaccttgtaacttacgggttttactaaggtcatcttgtgagacctgtgtactaggagcagtgtcattgatgtatttagtgtactttggtataggagtgctcacacaaatgtgtttcagttattttttagtagactctgccggcaaggtggtgacaaaccaggacggagttttccgcagcaactgcatggattgtctagacagaacgaatgtgatacagagtttattagctcgacgttcccttcaggcacagctgcaggtgaatattactttactgaaaaaaattgtagttaaaaaaaagtaaagaacctttacttttgaaaaccagcaacaataagtactcacattgcctgcaccctaacctgactgttttatttttgtaccttgccattggtgtacaagttatccataactaccatcagagcacatttgtagttttcactgcaccgtgtcctttagtatttctgtaatcatagttttaatatagtatatattgaactataatttattaaaccattaatgttactatatttgggggcatcaagtaatactataatgtatctatttttaatattattaacttgaatactttcctttgggttttagttgcctttccagtcactttaagcaagctgacaaaatcgatttagggagcaaaggtttattctagttcacaatttcaggttgttgtccatccctgtgaagtatattatgaatgtatccctggggagacatgaacaaaatatatattcattccagttagggaatccacaa

SEQ ID NO: 35522 - DNA, 2523 bp, Mus musculus
cctcagtattgctgggaccctgtcacagaggcaacaacttcttaaggtaccacagatgatggtttaccgagcctgcagaattgagacacctggtttaaaacttaagatgttctatttttcctgtggacatgctaataaacttcagtgtgaagttgtgctatacaactgatcactaggtctggtatcaacaaatgatgtattatctttgtttttaatatcaacaggtgacacttggacagaaacactggcatatgtcctcttctggggagttgcaagcattggaacattttttattattctttacaatggcaaagattttgttgatgctcccagactggtccagaaagaaaagatagactgaatttgtgtttgtggaaagcggcttggcttggaagactccatgatgcagaactggagtctttactgacctgctttccacgtgagcccaaggtcttcttaaagcctttatccaaaagtacctcctgtggttttgggctgggtgatgtcttagaattgatctgatattaccgctttgatgatctcgttaccgttgggatggttatatttatgatttgaagctatagtataattaaaatgtagcttaaattcagctcacagaacagaagaaatctattcactgtcaagtcagaattcacagataagtaatatattttaaaaaatttaacttctttcacattatttaaaacaaattatttttctagctctgtttcattattgccattgtaaagcagtcactgttagcaagcatattttccatgtatctttgggcttttcttaagagtttaataatatgcaaattctactatgcttatagagtgtctcttaaaggtcaagcagtttgctaaattgtaatttcacaattgtaaggaagaggagaatgggatctagagtcatttgaagtttctagtagctgcctcttggcttcagccagcttgagctgctgtagtgcccgagcagcttatatgtcatgaaaagttcagatatagtttatcttttttaaaaggtataaatgaaatcaaagaatgtaaagtctgtctcttatgctaaaggtccaaagtcgcctctttttaagaactgctccattgtgggaaatacactagactggccagctgcttcctctcctagcttgtaggattttttattattggttcctcattgagacatgcaggcctcagagaaggtcttgtactagatttgattctcacttggggtagcagttgcttttccatgcatggcactctggctctatcaccctgtcaaggtttatgttggctgtcaataagtgtctgaaatttagtgcttccaggtagccatagttctccaaatcaaggaccaactttaatttatgcataaaacagactgaaaactacgcttcagaagctgtgcatagttgtaagacaggttctagattaaaattgtaattatgaggtttagatattagaacagtatataaggtagtatcattgcactatcttaaaacaattcagttaaacactgctatggtacatcagtgttttgctttaaaatatgtaggttttctaatagtaccttatgttatccataaatatttctaaaagcgcctttaacattaccttttttcaacattatcttttataaacaataagggttattgcttttaggaactctggggaaattctgtgtagcttaaaatcagtcattaaaactcacaatagagtaagtaaatagagccacctgttctgacatgtaaataagcatagtttgttccaaagatggaacattgaagcccagctgtgtctactgtaatatattactcaaaagctactgggcgttttacagtaagcacttcatgtcaacagctacagcaaacaccaaatctgaaccactagtgtggctgcttcgcaaggactaatgtcagagggttaggctgcaagtgatcagtgtttgacagccctgcagtgatcttctttaactcatttactgtacatccatatgcaaaaataaaatgccatattcttttctaaccgctgttggtactgtttctctgtttttatcgtgttttttttttaatcttaaagcagtgtttgatcattatagaaatactagtcactacaagtaaacaaggtaaataacttctaaactgttttccagtaatcaccttagacactttttatagctttgtttttttatagataaggctaaggcaacatttagtaatatataacatttagtgatgtttaatatccataaaattatctgtactttcaaattataatttgtttcaaagagatacaggttgcagggtgataaggaagtatgggtgagtaattgctacagattgtaaccaatgaatgggaaaatagtatgtattttcttctgtgctcgcttccaaggacaagttttgacagttgtcacttcaggtctcattctatccatgatcaattttgggtaatagactgagaggtcagcctggtatgtgatgtcaagtgacctttaaatctcaatgactgttttttgttttta

SEQ ID NO: 35523 - DNA, 1225 bp, Mus musculus
catcgctgaaggctctcgtaactctaccgtcatgtctaagtccgagtctcccaaggagccagaacagctgcggaagctcttcatcggagggctgagcttcgaaacaaccgacgagagtctgaggagccattttgagcaatggggaacactaacagactgtgtggtaatgagagatccaaacaccaagagatccaggggctttgggtttgtcacatatgccactgtggaagaagtggatgctgccatgaatgcaagaccacacaaggtggatggaagagttgtggaacctaagagagctgtctcaagagaagattctcagcgaccaggtgcccacttaactgtgaaaaagatctttgttggtggtattaaagaagacactgaagaacatcacctacgagattattttgagcagtatgggaagattgaagtgatagaaattatgactgacagaggcagtgggaaaaagaggggctttgcttttgttacctttgatgaccatgactctgtggataagattgttattcagaaataccatactgtgaatggccacaactgtgaagtaagaaaggctctgtcgaagcaagagatggctagtgcttcatccagtcagagaggtcgcagtggttctggaaactttggtggtggtcgtggaggcggttttggtggcaatgacaattttggtcgaggagggaacttcagtggtcgtggtggctttggtggcagccgtggtggtggtggatatggtggcagtggggatggctataatggatttggcaatgatggaagcaattttggaggtggtggaagctacaatgattttggcaattacaacaatcagtcttccaattttgggccgatgaagggaggaaactttggaggcaggagctctggcccttatggtggtggaggccagtactttgctaaaccacggaaccaaggtggctatggcggttccagcagcagcagtagctatggcagtggcaggaggttctaattacatacagccaggaaacaaagcttagcaggagaggagagccagagaagtgacagggaagctacaggttacaacagatttgtgaactcagccaagcacagtggtggcagggcctagctgctacaaagaagacatgttttagacaatactcatgtgtgtgggcaaaaactccaggactgtatttgtgactgactaattgtataacaggttattttagtttctgttctgtgg

SEQ ID NO: 35524 - DNA, 1235 bp, Mus musculus
aagcacaaggccctcaaggtgaccatcactgtcctcactgtcttcattatgtctcagttcccctacaactccattcttgtagtgcaggctgttgacgcttatgccatgttcatctccaactgcactatttccaccaatattgacatctgcttccaggttactcagactattgcattcttccacagttgtctgaacccagttctctatgtttttgttggcgagagattccgaagggatctggtgaagaccctgaagaacctgggatgcattagccaggcccagtgggtttcattcacaaggagagagggtagcttgaagctttcttctatgctactggagacaacttcgggggctctctccctatgagagaacttctcacagggcatatggtcctttttggaaataatgagatatatagccacaacacagtctaaagagacagtaaatagtaagaaaactgggggtggagggcaggaaaaacaaaacaaacaatctgggatgagcctaaacaacttttatcatgttcagtcagaatctaccaaagtttccaaaactgagcactccagaagcgcagcagttggtttttggttatagtaactgcagttctgaggaggatgcttgagcagcagcaaagacagcccagccttgcacatgctgatcatcagtgcagctgggttttggaggcagagtttcttcagtgttcccagtttctgttacttcagatctggtgctactcctctttagaggtgacagaacactggctgccaccatggtcccccctcatggcccccaaaaaaggcttattgataaccacctcaggatcttttctctatagtcctactggtgagaagactgtttgtatgtctcattacctacagattttattttattttttaaatctagaatacactcaaacattctgaggttgaatgccattctgattgatctctttgatctctcttgagccagggagaaccactgtccctagtttggagccacctgtcagacaggttagtcagccaatgtacagctgaccacatcacattacctggagtcttgctcccaatccacttctgtgtcaggcagaagataccatgtccaaacctagctgcaagcacaaactaggaaaggatctagcctgttccctggtgtggccctcacagaattaagctggagaatatgtttggatggtgggaacctagcctttgggacttcctcaggcaagaggcacttgc

SEQ ID NO: 35525 - DNA, 2184 bp, Mus musculus
ttctaggacaggcaaatagatagcttagatagcttcctgttctctctggccccttcttactcctaccaccaagaatttacccatgatggcaactttgttcagtgtgaagaagccagcatgttcagctgagcctttgaaggctaccctgggttcttgtgggtctgtatgtggcctgagattgctaaaagccaaattatcttacctttgaacccttctaccctcttgcaaatggaatgctgaagccagcttgttcaatagatcaacagcatccagtaccaaataggatctcatttttattgcttggattttccagggtatattggagacactggccaaactcatggccttctgctggtgtcactgccaccatcttcatcaagagccatcattcactgagttgctgctgtgttggtggcctgggaggggcctgagaccttacatttgagttcatcctgaactcagtcactcatcaggaggcccatgtggttcttgtgaagctcagacctgaggtgagaggctccagtgctgactgcatagtactccactaggcatataccaactctgtttttaatagtctatttttgtgctaaatgggctttgtactgtacttgctccagtctgctgagcactaggttactagagaacatttggccctgtgtaagtgtgcctttcatacatagctttatggttttaagtagtccccagttttactggggtttagtcattggagtaaatttttgaaaaatgcaattgacaactgaagaatcattaaggaagatgatggcccagctggatttaattacaccaaagatcataaggaaacatccttgagatcttggtgattctcttcctgagggcagcctctcctctaatgactcagcctattcctaacagtcaggtcagtagtgttgccagctgcctgctcgccaataccactgaagcactatgagacttcacccaccttgagacagagtggccctccgtgtctgagtggactttgagagtattgctgactgaagtacccaggattctagctagtcctagaccaagagcaggcaaaggaattctcaaacaggaatctggaactgaaaatttccatatggttttggaggtagaaatgaagagccatatataaacaaagatgttatttctgaacaatttcaattgcccccccccccaggtaatcaaaccactcctggcccaaaaagaaggaaatcgtgtagatatggtttgatgatcatagggttttgtttttaaactcaaactcagtggttcaacctgtgagaattctttaaactgagaaaaaaacattcttggctcacaggttttggaaaaggaggcagagaggagagacatctttgactcctcagaaccagggagtgcaatacaaagactattgagtgctgctcacatttacaaaaacgaacactacttggtagaatcttagcacactttccttgtctcatttcatttcttctgaggaaacaggaaagttaattcataatttccttttccctctcaagcactttttaaatttccagagacctctgatcaagggtcatttttagagccttttgatgtgtgtttaatctcactcaatgttcttttggtgactgcagtgatactgagcctccgtgggaaggcttaacagttagagtgcactttaattcattaattcacgatccatgtggccttataataatgggtcaaggaacccatttcattcttgcctgccaaagagttacacagaagcacatcaaacaccagcacttcacctgcacgaagggatgagactgggatccctgagtaaacttctttaatagtgtgtgctatgccatttggaaatgttttttaacctcaggttttaaataaagcaaatactgtggcatttggagtagcattgtcttttattcctctgacaaaaataagtcgtaaaataagcgacagagctacccagcaggaagcagaacatctcacaggccccacccccaacccatcccagctcaccccacccccacctccccgcagataagagtgtgactgataggtcctggcaaacttcctggtcctctctgaggtattgagacctgtccaagcctgtgattccttccacctaccatcctctgccattcataaggctccagacctctctcatgacatcagagcactcaaacttttcaacct

SEQ ID NO: 35526 - DNA, 1241 bp, Mus musculus
gtccatccttttatctcagctccaaactttgtctctgtatctccttccaagggtgttttgttcccacttctaaggaggggcatagtgttcacacttcagtcttcatttttcttgagtttcatgtgtttaggaaattgtatcttatatcttgggtatcttaggttttgggctaatatccacttatcagtgagtacatattgtgtgagttcctttgtgaatgtgttacctcactcaggatgatgccctccaggtccatccatttggctaggaatttcataaattcattctttttaatagctgagtagtactccattgtgtagatgtaccacattttctgtatccattcctctgttgaggggcacctgggttccttccagcttctggctattataaataaggctgctatgaacatagtggagcatgtgtccttcttaccagttggggcatcttctggatatatgcccaggagaggtattgctggatcctccggtagtactatatccagttttctgaggaaccgccagactgatttccagagtggttgtacaagcctgcaatcccaccaacaatgggaagcctagggcgtgggcccgggtggagccgctgcaggtgcagatcttggtggtagtagcaaatattcaaacgagatatttctatcttcggagttcttctttggtttgtatcttcagagacttacgttcttatcatagagaactttcacttccttagagtcaccacaaggtttttgatatcatttgtgactattgtgaagggtgttgtgtactgggtagttttgtgtcaacttgacacagctggagttatcacagagaaagagcttcagttgaggaaatgcctccatgagatccaactgtaaggcattttctcaattagtgatcaagggggaaaggccccttgtgagtggggccatctctggactggtagtcttgggttttataagagagcaggctgagcaagccaggtgaggcaagccagtaaagaacatccctccatggcctctgcatcggctcctgctttctgacctgcttgagttccagtcctgacttccttggttatgaacagcagtatggaagtgtaagccaaataaaccctttcctccccaacttgcttcttagtcatgatgtttgtgcaggaatagaaaccctaagacatgttgtttctctaatttctttctcagcctgtttatcttttgtgtagaggaaggccattgacttgtttgagtt

SEQ ID NO: 35527 - DNA, 1210 bp, Mus musculus
tgtctacatggtccatccttttatctcagctccaaactttgtctctgtatctccttccaagggtgttttgttcccacttctaaggaggggcatagtgttcacacttcagtcttcatttttcttgagtttcatgtgtttaggaaattgtatcttatatcttgggtatcttaggttttgggctaatatccacttatcagtgagtacatattgtgtgagttcctttgtgaatgtgttacctcactcaggatgatgccctccaggtccatccatttggctaggaatttcataaattcattctttttaatagctgagtagtactccattgtgtagatgtaccacattttctgtatccattcctctgttgaggggcatctgggttccttccagcttctggctattataaaaaaggctgctatgaacatagtggagcatgtgtccttcttaccagttggggcatcttctggatatatgcccaggagaggtattgctggatcctccggtagtactatatccagttttctgaggaaccgccagactgatttccagagtggttgtacaagcctgcaatcccaccaacaatgggaagcctagggcgcgggcccgggtggagctgctgcaggtgcagatcttggtggtagtagcaaatattcaaacgagatatttctatcttcggagttcttctttggtttgtatcttcagagatttagattcttatcatagagaactttcacttctttagagtcaccacaaggtttttgatatcatttgtgactattgtgaagggtgttgtgtactgggtagttttgtgtcaacttgacacagctggagttatcacagagaaagagcttcagttgaggaaatgcctccatgagatccaactgtaaggcattttctcaattagtgatcaagggggaaaggccccttgtgagtggggccatctctggactggtagtcttgggttttataagagagcaggctgagcaagccaggtgaggcaagccagtaaagaacatccctccatggcctctgcatcggctcctgctttctgacctgcttgagttccagtcctgacttccttggttatgaacagcagtatggaagtgtaagccaaataaaccctttcctccccaacttgcttcttagtcatgatgtttgtgcaggaatagaaaccctaagacatgttgtttctctaatttctttctcagcctgt

SEQ ID NO: 35528 - DNA, 1134 bp, Mus musculus
agccatagggctacacctcagggagtgactcgacgtaatgggaaagagcaatacgtgccacccagatcaccgaagtaaaaacaaagcctacaaaaactactcagaagcttctcttcccactaaacttgagcctctgttgaactgttttggaggggaggaagtagccaggaaagaatgggaagtaagccctaaatatgacggatttttgaaattgcgagtaggaagagcccaaaattcatctctaaatgattttcaaatgctggaggattccaatcagtatatatatatatatatatatatatatatatatatatatatatatatataatttttctatttttgttttttattttaatttgcaggaattttctgcctggaatcaattttgagggttcagatttagcttgggagagaaaacaaaaaacattatacatccttcagtataggagatgagggagtgagagaaaatattttttgaagaaacatttctgtaaaaattagaaattactttttataatctatttaaagtttggcttgaagaatgctatctctgactaaatggccttgtgttgcagagtagatgagtggctagggagtccgttctgggtccgagtgtgtgcaaaagtgatttaagccaaatctgttgtcatggtagtaaatgatttcaacgctgaatgtaatacttgagtagattttctttgtagtttggaatttagttgtttttgttttttgacattactaatactgtattgtatgaacaagctataaagctctgattgtgtgtgaagctgtgactaccaatcagtttgatattcaaggaaagaatggagattattcaaaaaaaaattgaaaattctgttttagatctgaatactggataggtcaaatagattgcagaggtttaaactgccctgtgaccttttttttcctttttaattttttttctgattgtttgttagtctctgttcttagactgtcttccctccaaaagcaaaatgactaactgtttactagacagtatgtttcttactactttgaccagtttaatcaaattatataactattctaagctacataatggaatattgaaagatttttattcaattagaattttaggtcccaggatggtactga

SEQ ID NO: 35529 - DNA, 1271 bp, Mus musculus
gacacagatgcgcagcaggcttttaaatacttaagagaagaagttaaaacatttcagggcaagccaatcatggcaaggataaaagccatcaatacattttttgctaagaatggttatcgattaatggattctagtatgtatactcaacctattcagactcctacccaatatccctcaccagtcttcatgcaaccagtgtataatcctcagcagtactcagtgtatagtcttgtgcctcagtcttggtctccaagtcctgcaccttactttgaaacaccactggctccctttcccaatgatagttttgtgaatgactttagttcaccaggatcttacaaaacaaatgctgctgctatgaatatgggctgaccattcccaaaaaatcctgtgaagcctcattttaggtcatccagtggttcagaacactcaacagagggctccgtgtcattgggagatggaccactgagcagatctagttcaaggatctttctttctgaacggcataacccaacagtaacagggcagcaggaacaaacttatcttccaaaggaggctcccattttacagatggaacagaatggggactttggaagaggcagacgaactctcttcagaggccgaaggcgaagggatgatgacaggatcccaagaccccaacctgcagcaactgaagccaaggctccaactccgaagtttgacttgcttgctacaaatttccctcctttacctggaagctcatcgagagtgccagatgaacttggtttggagaatagaatgtctgatgtcgttaaaggtgtctgcagagaaaaggacagcaaggacgtgcgagttagttgcccagtgcctggagaggacggacagacagactgcacttctgcgccgctcagcataagtcctagttctccgtgtacagctgagcctcctgtgttaagcacaactcagcaagagcaggatcagatggaggactctgctgttccaaaggacactctcaacccagtagctgtgccagtgtcttctccaactgccacaaagccatccccggcaaacactgcttcaccttgcactagtaacataaacccaccgagagtggtggccctgcaggaacctcgaaagttaagctatgctgaagtgtgccagaagcctcctaaagagccatctccagttctcctacagccgctgcgggaactccggtctaatgcagtatcccccaccagaaatgaagagaacggagctcccgagaagcctgttgagaagccgcatgagaaaccaga

SEQ ID NO: 35530 - DNA, 2248 bp, Mus musculus
tcaatgagatactctttttaaactagattaagatacttctatgtagcggttaacagtttatttactatgtggctatcagcctgaattatctctagtcttaaaggtagaatttatcatttttttctgtatcttcattgttactttccttttgataaccactagtttcataatttttataggaaggtgtttgtgtgcatgcgtgtgcatgtgcctacattgcacttgccttagagcctgcgagggctttctaaacaccaagtgacaggtgcacttagtctgtccattgcaagaattttaaatataaacttgttaaatgtatgtttgtttctttttccagatgaaccgaggcatgctcaagatcacactgaaatcatcattgatgtgaacccagtatccagtggtattgtcaagttcaccggagcaccattaaggttgccaaggagaccgctcattctggttttccttctacatcttggaacactcttctgtctatcttaccaacgttttttgctctggttgttgtactattgtgtgtgaacggacttaattcagcacctatagcctttcgttgtgcttttctgatgtgtctgctttcttcattacacctttgagagcaatgactatttttccttactctgcatattctgcatccaagacactacttgaaatatggttggcatcactggaggtctttgattctattagtattttgtaatctctttgtggctaaacatttccctcccaatctggtgctagtagagtatccgctgtctaagcaccacgtgtgtagctcatgtgtattcggtgttgcagaaacatttcaggacagtttgagatgttccagaacaagaattagtattcatttatatgtcataccacacaatggctggcatggttttaatattatgtcatcatttagggtaacattttatagaattagtccttcacctaacaactttagtgtttttgtactgttgctaatttgcttaaaattttattcaaaaggtatcacttggtataaaggtaattgtaacacattacaatgaaaacctattgtgagtttttataaaaaataaattttaaattaatatacaaagaataatacatttaattttttttgcagtgctctacttctgaaatgtcaccttaacatttccttgcagaaaattctggggttgtttttgttgttgttgttgttgtttacagattcaatattctgtattatttgatgatgagcacgaaaaaaaaaaaacctgctactgaagcagttttcagagctaattgtgccatttagttgcttaagtgtcttttgcctctctcactttttcagttggctgtggttctcatccctttcctagtacagtggtctggctggctcctcagtaccacaagctctctgcatgtttatgcagaggagagtgagtgctaaattggtgtcccttagaaaggcttcagggaaagagactgctgtaaaggggaatgcaaaataaagagtttaaatgaggaagctcagtttgactctttccagaagaataactttatgccaaggacaaagacatttcagagttttgtcacagggtgtgtgatgtcaacactcttactcagctcatcctgagggttccaaagaggttctgatatggctggtggttgtgtctcgctttttcattataaaccattagatttggaaaggcctgaactccaatttagtgttaacacccttcctcatggtaccagtgaaatgtattgtgtccccatatcttacagacgttaaaataaaaccacacattctaatttgctggagtttctatttgtgacatgtactatgtggatgtgctttctaaagaaacccttatcttttagaaaactgtactgaaaatttacagagatgctactgttatttgcttcaatataatcagggtggtatacgtttgtacatagatgaaacaagactgactctgacttgataattgttgaagctgtgtgatagatgtttgagaattcattattctctatacttttgtatatgtttgaaattttccataataaaaattgtaaaactgtattccttagaagttacttggaggccaactctcccttttagaatctacgtatggatggctggtcagaataagaattcacaacacagaaatataagcctattctttttttttttctcagctgaaattttatttttgctttcagttcttatctatgtgctttagaaaatatgctctggaccaattccctc

SEQ ID NO: 35531 - DNA, 1279 bp, Mus musculus
agtagttacacctctcagagccagaaagaaatccagaggctatgtagtgttttgagatgggatacatgcaaggcaaacatgaggcactccaggataattttaaaagaaggaaatttgggggctgaagagatggctcagtgggaaagagcacttgctgagaaagcatgaagacctccattcagatcccaagctagatgaggccacacatgcctacagccactgtactgggtcagcaaagagacagaggagcctctggggcttgctgactaccaatctagccccaaaacagtgaaatccagattcagtgacagaacatgtctcaagggagcaagatggtaagatgaactgagtgatcatgaaggatatacaacatcctcctcaagtctccacttatatcttgcacacctgtttacatattcacccaccacacacacacacacacacacacacacacacacacacacacacatacacacacattaggaaaatccagccactttcagaagtttatctataaaaattaacacaaaatgctgaattgtctttaaattctaaggtagtctacggccataccaccctgaacgcacccgatctcgtctgatctcagaagttaagcagggtccggcctggttagtacttggatgggagaccgcctgggaataccgggtgctgtaggcttaaaaaaaatattctaaggtaatatgcttccttttatatggagccaggaagctaaattgtactgactcacaatctatacatttgattagttacagagatatgggacagttctgtgatcattatattatttcattttgtgcaatgactacaagtgtattttcagatttgttaatctgtataaaaatcttacctttattcttctctctctctctctctctctcacacacacacacacacacacacacacacacacacacacacacacacacacacctttttgagataggagcttatatatccaaggctggccttgtcccatctccacctccctagttctgggactataagtgtgtaccaccaagcctggtttatgtggtgctgaggactcaatctcgggcttcctgcatggcagaatattgcctcagtcagctgctggtagggcttctcagaagacagccatgccaggctcctgtctgtaaagcacatcatattccacatacataccctaacaactgagctacatctccagcctcaacatttagtttttaattgataatatttgtacttatttataagttatggaattataatttggaaatgt

SEQ ID NO: 35532 - DNA, 1106 bp, Mus musculus
ttcttcatttacatttcaaatgttatcccctttcctagtttcctctctgaaaatcccctataccctcctcctccccctgctccccagcccacccactcctgcttcctggccctggcattcccctgtactggggcatgtaaagtttgcaagaccaaggggcctctcctcctactgatggctggctacgctatcttctgctacatatgcagctagagacacaaactctgggaggtactggttagttcatattgttcctcctatagggctgcaaaccccttcagctccttgggtacttactctagctcctccattgggggccctgtgttccatccaacagctgactgtgagcatccacttctgtatttgccaggcactggcatagcctcacaagagacagctataccagggtcttgtcatctttgttctattcttaagctcctccctgggaaactctgccttttgccatctctaccctgccatctccttctgaggccatgctttacactgtaatcctctcttctctgcattgctctgtggggtccaaccactgtgagcaccagctctccaggacatcatccagatggctccaggtggaaaggaccaacttcccctagaaactgtggtgaacctcaaatccacatgttagctacaaatggagggaacacgtgataatgatgatggttggggaagttaagaaggacccctcatgtgcaacctgaggtgtgaagaggggtgacagtagtggggaatcagggtgtctgtaggctgactggtttgctgaatatgtaaattgtgttccccaggttggcaatgaggagtgaggactatagcattcattaaaatgttggggaatgttgtgagacttgtaacacaacagccattctgcgtgttactctgtgttcagagtgggtatagtaatttttgtgcttgattcaagcacttcagcactatctgagatttgaagacattaaatcagtgtgagtatgtgtgtatgcatatatgtgtgtgagtgtgtgcacgtgcgtgtgtatgtgtgtgtttgtgcacgcgcatgcatgcacgtgtttttttacctttgcttaaacaagtccaaacgtgttctattt

SEQ ID NO: 35533 - DNA, 1151 bp, Mus musculus
cctcctagaagcctcatcttcaaatgccatgagatattaattggggggctaaattcccgacatatgaattgggagagggcatttaaaccatagcatgtatagaacaaaaagtatgtatttttgctatgcaaaatgaaaataaacagcttatagcaggtcatacttctgcgttaggcttgctattattttactgcaacttggaagatgtgtaatgaaagtaattttgcagcttaatgtggtgataaatttaaatatcagctgccaccagaaaaaagaaaggaatttaccaatgaatctcaaaatagcttggtagatggaggtagggcagagataagggagaggcttgtgtccatgtatgagttccatgtgagaatttaggatgagaggacaagaaacaccctagtggcattgcttttaaattgtcccagtgttcctgtacacacagggccctaaatgtctcctaactgattttctcccaagctgcatgtgcatttggtaaatattctaggacactggtcacacgtgaaaattacatttctgagcttccttttggcgttggttggcagattgactatttggggcagttgttcagttcttctcagatgtagaattgaaatacaaaggatgcatggtctctgacctcagggaatcttagcatgcatcacctggtcaagtttttaattcatagaagacagggaagacgtcatatactgcactcattacttgaatcctaatctgaaccattaccaaccccacacactgtggcttctattaagaacagagatttgccctaactggtggtgattggcaatggttgctgggtgactctgctaaaacaggaaggaagaaccaaagatagcaaagtcccgtagttgagggttggaggcacattgtacgagactctcctccttcctgtgtgttccagactcactggttccatcacagaaatatctgtatctatttcctgaccaggggcagtctagatagctggggatccaaagtttccattaaccctctctggtctggagtacttaaggagaaaatcccaagtgcccaattgattactattactttgctttatacaatacctgtgatactattttgattatctctattagtctgtttatgagttcttataaaactaaatcttg

SEQ ID NO: 35534 - DNA, 1171 bp, Mus musculus
gctgaattgttagtatgcagcctttctcattgctaccttagtattttcatgtcctaattctgtaacgttatgaacaaggtcttttctatttctctattcctttctgtaacatcaattctgcaatgagagctggagcccagacgccttttgggcgagctgaatgatgatccatcatgtataacttctatcctgtagtgggctatactccctacctgagaggaaccataaactcttatgtattctgcatatcaattggagaggagctggaatccttgtagcacaagaagctttgtctgggactgctacatcctgttagcctcaactcagcatttctctttgattatgaggcatgctccaccttgaactgctgttttcatatctgaggacatcaggtcttgtcctgcatctgtcctcataagtttaacattctgagtttaggagtaagatctcttgtgctgtaaaacaagcaaacataaacaaacaaacaagctgatgcttatatagagagaatgtgacaaaatagaaaagaatatttctaagaagaaacaaagtggtagaatagacttaaaaaaggataataataagctttaatacagtattgtataatatattagatacaatatcatgctaacatgttaaaaggaaaataaggaaaaaatctaaaactttaagattacaggtactgatatacctataaataaggtatattatctccatatttcaacaagttaagatgcccttttctcttatttgaagagaatttttaagccttaatagaacacagttgtaagattccttgccttcaagatgctcaagactgtgaagaaggcattttggtgtagagaacaaagtcctttctctactgcaggtgaggcaagccttcatctaccccaaacaagtgtcatcagtatcagaagataatgtttatatccttgacagggaaacatttgattatactctaatcattgatcttttacttgaaaaggttaatgaaaggcagtggcttagtgcctcctcgtacatagttataaaaacaacagtctggcctttaccaattttttgtagtgtatactttatagaccctttaccccaaaggcacagctgactaaaacagttaacatcttctttatcaggtaacatgagttacaaggccccttaataatttttcttt

SEQ ID NO: 35535 - DNA, 2984 bp, Mus musculus
atacattcacctcacaccagttccagggcctctaccaaatgtggcagcaggaggcacagaaggggagacttcacataaggagagcaagcatggagtccacccgagtattcttccctctggtaatagccaggcttaaacaaattggttccatgtgtaccctccccaacacctagttgatagctttgttaccgcggctttcgccctgttttcacatgatgatagacctgcctctttgtattgtaacctgtcctgatatcactaggagtctcgtgccagggtttcactctctgattctctaacgtatctctattatagttgactttgcaatacagcttcgttactggggaagagggttcttatcatatttcaaatggtctttaatggtattgatttttatgttttctttttctttcttaactaatgaggtgagaaaaaacaagttaggcagaaggaaaatataagtctgagcccaccgtggctaaggaagcaagcgccaaagccttgaattcttcctaccatagttccgagtagctattaagtttctctccttggacttagagcctcctaaccatagctcagctatgtgcttccttgagggctggatgactataaccttaacattcctgagtagggttcagtgttttttaactgccttttgaaaccagagtctcctataactgaaagatacaggatacatgaaggaaggaaggtgggtgggtgtggaaggcgctcttctaacaactgctttcccagccagtggctagctcaaggaaccaaaaccatgagagtattttcagccagggccaggcctcggagcaaattatgattcacccaggatctagacatacactatccttccttgtcttcggggcctatgtactaaagcatcccttcgggtggatgcctgaaatcctcaatagtaccaatgcttgtaaatagcacaattgttaatctcatcactgaggggactaataagtgactaaagaaaggctgcctgtatagcatggatacactggataaatatatgattgatggtccatgtgggatggagcaagctttcatcacactgcacagaatggcacataatttaaaactgatcagccatttgactctacgatgttccatttaatattgtcaaccatggttgagcatgagaacggaaactctggaaagtcaaactgcaggtaagagggattgatgcgcaaagcactaaagctgttgctctcgccaagacctgacgttggtagccagcttctatcctggaaaagcatccaagtgagcaatagcaagaggggactcatcaccaaaccgcccttctatcttgctcagtcttctgttccctactaactgggtacattccttgatgatgtcgcctaacgatctctcaaaagcccaaaacaaccaagccctggcatcaccacctgtcacagctgagttcctcagggtccttggacattccctgtagcttcagtgttactttattcaaccaaagaattggccaaggaacttcacagctgctacaaataccggccactctcttccattctctgcacactgtgtctgacagctatgggagaatcttggctggcgaggtattctaaagggatgggagccttttctatgagccattgggtatgctttttagtactgctgcctctgcaataagcactgtttatctctcagtactgccattctcccctcaagtgggagatcacaaattatcttcaacatgactctaaaagtatactgagcgctgaagctcagttgctgctatgctatgctatggtgtaccacaaagtactgtgcagcgctatgctgcgttatgctgttctgtgcttttctgttcagaatggctgagagtttacccaaagtaaaattgagaggggtgaggaactgtttgaataaaagccacacttgccttaccttttttaaatataatgggccctaggacaatcaataaggaagttgaaatgtcttatactagaatagtgagagttgtgtgttctgtcattccaagatgtgtttggctacagtagaacaaggaacattcactttactggatatcatggccataggctgggtatttgtagccttcgttaggtttattataccttaagtatatgataccaaaaatactgttaactgtggtttgtgtgtgtttgtttgtttgttgtgttggcattgttagagatggagcccaacaccttatatatactgggcaagtgtatcactgagctatagccccagccttaattctcagtttttatcacttgccccacctcaaaatggtttatacatttggaatcagaatacacggctgagtttccaaagtatttgaaagataacttcacaactatacagagctcaatagactgaactaacactggtatgccctactcctgctatggccttcccaaagtgagaatacaaaatgccagtgctattggcatgggttcattctctttctctctctctctctctctctctctctctctctctctctctctctctcgtcttgccttctgggatcagccatctttcaaggcctctgcgaagatagcagagcggcatggaagtacgttcagaggttgacccaccccctcaaaggttgctgatcatctactctttcccttcaaataaatctcattggataatacaaaagcagggtggtggatacaagggaatcaatgcaagattgtgatcatatgcctgttcttctcccatccccagggctgtaggtaattgactcccctcaagtactactattgaaggctcagctaagacataaaagtaaatacccaagtggagtctaaaggaatgggatagctttactgaaattaaagtcctaaaaagggagaaattggatgcacaggaaaggaaagagagtaaaaatatgaaaagcctctttgaagattggcttcatacttctgtttgccatttaacctcatatgccaagaaaggtgcctaaggggtaccagactttt

SEQ ID NO: 35536 - DNA, 2401 bp, Mus musculus
tgagtgggcacagcagagctggcagttgctggcctttgcttcccgatcagccatttgttccaaggagagcagctcttggaaaaatgtgattcacagtttcaagctactccccatccatatgctggccacattctccttcctaagtaactgcatctgggcaatgttctaaagagatcaagggaagaaaaggagattttcccatggtgtcggtaggattttgccaaatcctccaagaaggatgtgatatatggaccttccttccttcttccttcctttttttcatttccctctttctcccccaccccatggggcctatcaggttaccctgtccagcccaaccttacagttaaaacttcctacctcgaagttgctaccaaagggtctttggcctgcgtgtgcacacttgtcaaatgaatgccctgactaatgtttggcttcttgaggagaacctgtgtgatggtacagataggcaaaaggacagtttgcctctgcctcttcctttgctcctcctaccatgcatattctaccttcagctctcttcccattgttctgaccatgttgtttcaatatgactgtggtgggtagggacgcaatgaccccccaagaacagagaatggaacctccccagctggtgagaggccattggcagtttgctcagtccacagtaagggccaaagccagaaatccttactgggagtgccgagggctttagctgtattatacattagttcagatgtgctgggttaagaagtagtttaggatctaatgagaaaaaaaaatgccgtttagtgaaatggagaagaaaacagaacctgtgtttttttttttgtttttgtttttgtttttaatcaaagtggtagtgttcagcgttgccgtcaagtagagggtacctcaaaatatatggtccttgtccctcgttctctttcttaccttccacttttctttcttctccattgtcctgccttttttagtactcagctttttatatataagtatttacttttttttaagctatatatttggtcctttgggactgtgtgatgattaaattgtattccattcaagataaaactatatgtttaatattgtattctctaaagttgtcttttgaagctatgctgctatccaggtacaagccagaaaggaattgggcctgacagcatcttggtcatgtcaccagagggtgactctgatgtcatgataatgactcttattgatttgaccaaggccagcctcctgtttatacctctgcccattcatttctggccatgggaaatataccagctattgggtgagccattgaagccaggaggatcagaagggccagggtccagcccatggacaccatgtgaatttctctgtaggaagctcatttggagggctggcttcagtcgcagtagccaaagaaaaatctgtctgactggacctttgaattcctaagagttggtcaaagttccgctgaagcttatgcgtagatatctgtagctgcttggcatccggaaatgagcttcaaccaaagctaatacagtcccgagtttccaccggaagcttggtgctgagctgttcagaccagtcctttattagagggttgccaatctttcagccacgcttttgtacctttattctcacctgctcatagacatagcctgatccaaaactgtggcttactgctcgctctgctctgctcactggtcatgtatagtgacatagtgtaaaaaggaaaaaaaaaaaaaagattggggagttaggtgacctggtttgtattccctatgcttctactaactagcctcaagatcttaaccgctctgtgcctcagtgttcccatctgcaaaatggggatagtgtaaattgccctacctacctcacagggttgttgtgaggataaactgagacaatgaatggaaagcacttttgacaagtaagtgctatgcaaagtgttaagaaatggaaccaatctagttcaaggcaatggaatggacattagcagaagggttaatgggatcgtccagccctttctctgtgtggcttaaacctaggttgccattgctttatacattttcacttagcacagatttgtaattatgcatgaaataaagcacagccttatccaacttgattcaagtctgtttctgaagaccttgaacattttgagtgttgatttttgaccatcaaaaacacaaggccacggtgtggggcttggggaatcgttttaaaagagacctaggggctggagagatgactcagtggtttagagcacgtgttgctcttgcagcgggcccaggttcaattcccagcagccacatgatggctcataaccatctgcagccccagtctcagagcatctgatgatctcttttggcctccacaggcaccaggcacacatgtggtgcatatacataca

SEQ ID NO: 35537 - DNA, 1097 bp, Mus musculus
catgaccacctagtgtattatgtggagatcaaagttcctgtcttgtcaaagttcctgtgggttgcaggttcggtcagtacctttctttagtggtcctgcctcacgaaggtttgcaaagcaggaaacattactgtgtcaggtatttgatggccagggaaggtttggtcctatctcagagagcagcggtggcatggagagtatcttgtttgcttttgtatctctttagttctttctttttgttgtacccagacgagccagtgttaaggtgctactccggagaataaatctaagaactcagataacactgtgcgaacggatactttctagatgctaagcaccagtaggccctccaaataatttgacaacatccctttgatacctcactccttagaaatatcattcattaatcttagtttctcaggaatccttgcagcttgtatgctagaaatagctgtagtgtatggtgtccattgtctgtctgatcttatggtttagctcaaaggttaacgcgttccgacaggagtactctccaagattgctagcctagcacctggacacacagtggctcttgtcttgaggtaaagggggctctttcctgtcattgccattccattccatcaattagatattcctaaaaacaaaacaaaacaacaaaacacaaagccaatagagggaagtctgtcagtagcctcaaatgactacatacctcaagggtaaaatactggataattgaagcttttcaagtgaattgagacaagtttattttggtactggaaaaggaaatagcctgatgtaaggaaagtgtttacagaagaatgccaataaatgcctcaagagtgtgaattttcctaagcactaaatctggaggaagtctagctgtgagggctagatttatggatcttttaacagtcttaactgctaaattttatatctttacaccttcaatggaaagagcttaatgaagctgagagagattgcatagtgagctcaattggagattaacaaacagaggactggtgatgtgaaataatcgctattagagatcatttctactttgatatttggttagaaaccgccaaattgaaacgccctccccc

SEQ ID NO: 35538 - DNA, 1082 bp, Mus musculus
tttgttacgtttaccttctcatcagaagacagtgctgctttggtctgtctgccccaagtgaagtaaaggggttgactttgggggcctgcttggcttggtcttttgaagtgcacaaagttaagttacagagctttctccttggccgaagaaaggctacttttccaaatggcaatgctaactagtagacgaggactttgttagaaatctgttagtagctaggaaccatttattccagttttcttgaaatgaagataagttctgagcaaaagtcggtggctaggaatgtcacgttgtgtgaagtcctaagccaatctcatacccagatgccacttccacagatgctcctgcttcaggcttctggaataagaacagtatctggaactgggtctaggctgaatactgggaaagtggggaaaattcagagctacattagcatcccggtgcatttctttgaaaagaccaccagtactaaaataactggacgcctgtgctccactcggtgtggagtatgcacaacaggccattgttcctgtgagcatgaagcaagcttgagatacttccacgtgtatggaaggaactggaacgggttaggcaactgcaattaccttgaggtgccatccttagaaacctaactaaaatgcagagccatccttaaacctaggtgtagggatgaggcctgatgacaccaaaggtgcttgtacccagttaaaaaaaaaaggtgcctgtctcaatttcctaccacatctgtggcagtttagaaaaatcacattatagaaacacccggtggaattcacaagccaccaccagcattccaaccactctttcattttctatcattttatccatgtgcaattactctccctccattctgtttgcctctcttctcagcacagaatcctctttaggatggagcagtcagcttagttaatcattcctaataacaacaaaaatacctactagggttagttaaattgtaagccgaggctcagcagtctcacagcacttggactagaggtgacacccacacagcctttttgtttgccatggggccccattgctactgccatgcctccgtttccctc

SEQ ID NO: 35539 - DNA, 1086 bp, Mus musculus
atttttcattaatataattttaaattggtaataatgttgactattccaaacatacaacagaagaaaaacgtatggtaaggaactaaatgttatatgagctcacatatgtaaaaatacgtgtttttgtattagaaaaaaacttgaaaattttattctgcctattgacagctaaatttttataatgagcatgtgcaattagggaaaaaagcaatgatgtacttttttggttttgtttttttgtatgattgtttgtttgtttgtttgtttgtttttaacctacaaggctgcttttcctttgttactttgagaaattgaagtcatgtctactggagagccttgctttaatgcagtctggaatctgtgccgttattgctgagatcctatcctagcctctagtggttttctgtactgtagcaggcctgcagttgtactgactcccatgctttgcttcccctgtctgtttgctttgtaggtggggtgactcggatgactgtttctcttgttgtcataatgtttgaactgactggtggcctggaatatattgtgcctctgatggctgcagctatgacaagcaagtgggtggccgatgctcttgggcgagagggcatttatgatgcccacatccgtctcaatggatacccctttcttgaagccaaagaagaatttgctcataagactctggcaatggatgtgatgaagccccggagaaatgaccccttgctgactgtccttactcaggacagtatgactgtggaggatgtcgagaccataatcagcgaaaccacgtacagtggctttccggtggtagtgtcccgagagtcgcaaagacttgtaggctttgttcttcgaagagatctcattatttcaattggtaaggattttgggaaagggataaaggcacttgatagctggacatgaaatcagggacacagagggaagagagaggtccagttaaaggacagaatggagaactagcacttcagctttctacttttcatttccttctcttcccacagaaaatgctcggaagaaacaggacggggttgtgagcacttccatcatttatttcacggagcattcgcctcc

SEQ ID NO: 35540 - DNA, 1175 bp, Mus musculus
cttttgtggaagagccctcctcctcctcctcctcttcctcctcctcctcctcctcttcctcatcctcctcctcctcctcctccttcttcttcttcctcctcctccttcttccttcttccttcttccttcttccttcttccttcttccttcctcctcctcctcctcttcctcctcctcctcctccttcttattcttcttcctcctcctccttcttccttcttccttcttccttcttccttcttccttcttccttcttccttcctcctcctcctcctcctcttcctcctcctctcctcctcctcctccttcttcttcttcttcctcctcctccttcttccttcttccttcttccttcttccttcctcctcctcctcctcctcctcttcctcctcctctcctcctcctcctccttcttctttttttttggtgacacaattttttggcacattctgtgtggggtttaaagagatgcagtgatatgttgttgtttctagttcttgaagtaaaaccccaaactaatgtacatgctactcaagcattagtctactaaggagtcactcccaaagcccttcttcttaagacagggtctcattatttaccccagactgttcttgaactcatccccaagctggatggaactgtgatctgcttcctcaccctcctcagtggtatcataagcaagaactaccatagatgttactgtctcttaagctgttattgcctctctcgtggtggtataggaaggcatattaacatatgagtcctgggctggagagatggctcagcggttaagagcactgactgttcttctgagttcaaatcccagcaaccatatggtggctcacaaccatccgtaatgagatttcacgccctgttctggtgtgtctgaagaccgctacagtgtacttagattataataataaatctttttttaaaaaaaaatagatgtgggtcctaccgtcaggaacttatcacattttttcatggtttctgagtggtattatggaaataccttttccttaaagttccatcaaccttctatggcaaccccaaacactatagactgagtatcccttatccaaagtgctggtgagattgctcagtggataaaggtgcttgccaccaagcttgtcagccccaatctgattagttccaggaccacatgatgccacatg

SEQ ID NO: 35541 - DNA, 1145 bp, Mus musculus
gtgtgtgtgtgtgtgtgtgtgtgtgtgtgtcttctagagacagggtttctctgtgtagccccagctgttctagaactcgctctatgggccaggctgggctcaaactcagagatctgcctgcctccccctggagagtagtttaatacatattaatttatcctaaggaaagaattaaagatggtgctccaaggatatatgaatgaatatattaactgtagcattttcagtgtttggaaaattggtgacatttgtattctattacagtcatacagtggaatactgtagtttctaaaagtgatagtgccctacttattggcttagaaattgatttatgatatagtgttacatgaggagaaaagcagatttcaaatgattaatagttaaaagtctggttcattgtgtgtattagtatttctcagctccaccctcgctaatatattaaatgataagatagttgctagcctaatagttcccaactcctgtgctcatcagtattgtggattaaaaaaaaaaaaccttgaaactggggctggagagatggggctggctcagcagttgagagcacaggttgatcttccagaggacctgaggttgattcccagcacccacatggtggctcacagccatctttaactctagccccgtaggaatttgacactcttttctggcttctgagggcacggtggtacaaaggtgaacatgtgggcaaaatagccatacacataaaataaaataaaataaaataaaataaaataaattcagaccaatttaatctgattctctccaggtgttgtgtcatatgcctttaatcctgagatttgagaggcagatatctatgagttcaaagccagctggtctacactagtgacttctaggccagtcaaggccacatagtgagacgatatctttttaaaaaaatgattttcttggagtgggtggaaattaattagtatttttaaagccccccataccctcatgattttaatgtacaatcaaatttgcgaatcactaagtagtggttgaaaggatgaagtagggaaagttactgtttcatatatgggctcaatgtagagtagtaactattattgttatgattttaaattattaatagtgagataccactttcatgtatgtttttatgtcca

SEQ ID NO: 35542 - DNA, 1203 bp, Mus musculus
actgccttctgcctatgggttcctgctagctggaatcgtctcgacggctggcagaaatccaggagctgcaccacagtgttcgagcagctgcagaggaggctcgccggaaggaggaggtctataagcagctggtaaggcctactttagggccctgggttgtaagggtggttgtggtatagggcttgggctcacgcctgccatgttcccacctaggtgtcagagctggagactctgccaaaagatgtgtcccggctggcctatactcagcgcatcctggagattgtgggcaacatccggaagcagaaggaagagatcactaaggtatgatgtcactgtggctctgattgatggctcatgtaggcagacaagcataggggtgatcacacagggactttatgctcactactaggcagagctgttcaggcacactccaacacataatagtcaccccaacacagcgacatgggccctgactggatgtaagtataggcacgtgagtgttatcactgatcagctaccttgcccaagatgtgcactgatagttaccctggtttctaccagatcttgtcggacacaaaggaactgcagaaggaaatcaactctctctctgggaagctcgaccggacatttgcagtgactgatgagcttgtgttcaaggtatggagcaggctggcctccgggagggtggaggcgggactgagttgttgcctgcccctctgtgagtcctttaggtgcactgttgcttggggcctagctttgctctgtggaggatgaaggcaaagtactagtaaagggtggtcttataggggcatagagtagtggaaaagggggaatggcttgctgatatctcggagatcccctttgtcttatcaggatgctaagaaggatgatgctgttcggaaagcctacaagtacctagctgccctgcatgaggtgaggggagccatgtgcctggtgggttggctggagagggccagcataggtgcaagccttgtattcttgctgtctccagaattgcagtcagctcatccagaccattgaggacacaggcactatcatgagggaagttcgagatcttgaggagcaggtgagacctgggactggtaaggggaatggagacaggccaggggatagttccttgttttgcgctgagagtctttgaaaccagacaactaacagctagaggctttgccttcgtgccca

SEQ ID NO: 35543 - DNA, 1837 bp, Mus musculus
catccttcctcaggtgggacttcttaggagtcgggacagagcgcagagtcatgctttggtccaacttaggagagagaaccaggtggtggagctccactataacgccatctgccagtacatgggccccggtgactcagatgaagactgacacatggaccactgcccgtcgctcagatgccagggagaagacagatgttctgtcctcctttgagatgcaaggatggggatgtgactagatagagcagaactgtttaccaaactttagagtgtgataaaaaccattttaaatagtggaaagatgaaatcaaaaccagtatgtaaactgtaaatttgggtggaagctgagataatcaaagtggaaacacttcatttcttagcctcatttccctgctgagggttcaggacaagttaaattccccattcagtacatagtttacccttggaacatgaaatctatgaagtctgtccccagacaaacacaatagaatctgcaatgttgcatctcagaacaacttcctgagtttggatcttgaatggtcttcaaaggctcttttttttttaagatttattgtattttgttgttgttttatgtgtgtaagagagaacgagtatgtgattgtgaatacaaatgcttccagagagagagaaaatatgtgaatgctcagagaccattaatgttgagttccccaggagttgaagttacagacaattgtaagctgccctgcatgggagccctgcatgggagcagacttggatcctttggaagtacagtaagcactcttaagcactgagccacctctccagctcctgtgcccatatggtaaaggactcttgctcgggattatgctagtagcacatacgtttgacctctaggaatgtctctgggctgataatgcactgaagagaaaggggaacttctgcccatgaacagcacgggttggctccagtttccaaaggactagtcacttctagtccccgaacatggcttaggttaaaaggtatttctgactcgtgcactttctttgcttgccatgggtgattagattctttttaaaaaaaggttattgttgagaatcctgaacctttttcctgcttgatggttggagaagaaaagtcagagccttagacacaattgtttctagataatccctaatatatatagtatttaagttaggcctgtgccacaggttaaaatacccaacttgtcagcccgccacacacactgaaaagaatcaaaacatcccagaacacaatgagactggtaaatgtggctagaactgggctgaactctctggccaaaataaacagacaaaaggacatgagtcacacagagtgtggtggcccatatctgtaatctagcacttgagaggctgaggcaggaaaatttccacgagttccaagacagtctgaggagcttcactgaaaaacctagcaggaaatgtgctaggtgaagtagcacaccctttgagcttcgcaggcaggagagagaagtaggcagatctccatgagtgcgaagccagcctggtctacaaaacaggccccaggccagccagaactcctaataagaacctatctcaaataggaaaggatactgtggttttctcccttcctattgtcccttttatgtcttctcttatctaattgctatatctaagactttgatactgtaggggacaatggacatctcattcctgatttccgaggaaatgctcagtgtgtctatttaatataatgttggctatagatttattgtatatagccattattattttgacatatttccatgtatttctacagtctcacagcttttatcactgtcaaatggattttcagcact

SEQ ID NO: 35544 - DNA, 1191 bp, Mus musculus
gccgtcgcagccaccctgctgcctgcctggctgcagtgcttgccattagcctcttcattctctgggccgtgggtggcgccttcaccttcctgctcagcatcacagcgcctgtgttttgtgagtctcgactctccctgctagagctggggaagacggtcagctcatgcttgaacatcaggcctgcctggcactggtttctgaactaagagaggactagaaaccctggaggacagacatgcttccattaagtgtgtcttccttggctttggtcctctgggagcatccctctattacctttgtgggtgttccagggttaagtgccttaaactgtccaagtcccaatttactgggatgtccttcctggccacatcccccacagcaggctttgagaactcaccactccattagcctgcctctgagtgaattccccatttcttggtatcgcctacagtgatcctgctgcatgcttcactgcgtctgagaaaccttaaaaacaagattgagaacaagatcgagagcatcggtctaaagcggacaccaatgggattgcttctagaggcactgggacaggagcaggaagctggatcctaggaccttggcatctacaccctggacgtagaggacccccaccccatacccaagaccaacccttttcctagccattaaaataggtgcctagagtcctctggcctggccaaaaagagacacctgtgattgatcactgcagccccaaactagtcatctcttagcctccagcccctgttacctagggaccaaagtcttcctcggtcctgaatttgagactcagtcacctacttccagtcttgaaactggacttttaagccagagcatctgtggccaatctcaaaactggaccccaagatactcctctgacccaaatgtgggactcactagtcttccatacgtcaaagctaggccctaaggcaggacattctcaaatcttgagctctaaagatttttcagaccccacacagcttggaatataggttataagacctggccaaatcttgagcctaatgagtccacactgagcccttaaccccagacgaccctagccctcagcagtcccaatagcctccctccaaccgttaagagggtctcttcctccctcacagtgttctcagtatcaaggaccaacatgtggggctggctagggatagccccaactgg

SEQ ID NO: 35545 - DNA, 1200 bp, Mus musculus
gctaaaaggggctaggttcaacccgaccacgccttaaagcatctacctttacctgaattcaagaccgcggtgagcttgcgtactcaccttcctgttgcctactgttcaagccctcttttatcctcatgtcaggttactgcaactctccttgataaccactaagaccattaagccctgctggcctctctgccttcaatggcatatgcattagccataatccattctcaggcccatttttttcactggggagatgctgggacttagcttaccttggctgagctgagcaaggcgtgtacccaggcagacaccctgggcattgactagtgctcctgcagacagtggcagtggctggagcaccgggaggccaagacgggcccggaagtccctgagctgctcctccagctcgtgcagccttcgaagtgcatcaacctgtacctggcgcctgcgccgcctctgttctccgttgaggtcaggggccagggccaggcggcgggcagcagctgcaatctgctgctgcaccgatacctccctctccaaggcctcaagagccagttcctgcacaacccaaaaggggtggggggtgggacagaaccaaataatagaaatgactaagcacagtaatgggcagttggcagagcccatctacacaggaagcggagcatgatctttttaggggctggcctgtttgcctaaggaaggaatgtattcatcctcaggggacaggatgaggggcttgtctggatagacttgggttcccatagtgcatggggaaatccacctattcaaatccttgccctcctctctgcttcttctcctcctggccctaaccgccattgtgccctggcttgtccccgcccctcaccagcatcagctcacctcagcaggacacaaggagtggtgtgctgggtttgggtgtggtggagggtaggcacgtgctgcagggggcctccggcggaccaactgaggtcgttcaccaggctccagtgggcactcagggggcagctgaccagttagctcctggaaggaatgtggccagagactctgagagttagagggatgacattaagtaataagggtaagaaactagccctcccaaggagcttggccctgctcaatactccacatgtattagatcgccacctctcaaggtctctagcacccggggtagggcgtatagttctccagcgggccaagtctctg

SEQ ID NO: 35546 - DNA, 2579 bp, Mus musculus
cagggatacacagagaaaccctgtctggggggggggggtagcaaagagattctccaaatagtagtctaatgtatgtcgcatatatgttgacttgtgctgtaataagagctgtatgccccttaactcatttaatttccagaaacagccatatgagagaaccttccattattgtaccattttacagaggaggactctggggctcagagactaagcataaaatttggcaagtagtgagggccagaggatgcattggaacctagtagcctggcctttcaatgaagacactcttctacctgtgacgggctttgcaccccatcttactttgtacccaccccttcgtttttacaggagctagaactgcaggcccagatccatggtctgccagtccctcccaacccaggactgctctccctaaccacgagttcggtctctgacagcctcaagccagaacagctggacattgaggaggagggcaggcctagcacaacgttccatgtatcgggaggacctgcccagaacgctcctccacaacagcctccagcaccaccttcggatgcccttctggacctacactttcccagcgaccacttgggagacctgggggaccccttccacctagggctagaggacattctgatggaggaggaggggatggtgggaggactgtcagggggtgccctgtccccactgcgggctgcttctgaccccctgctttcttcagtatccccggctgtttccaaggccagcagccgccgtagcagcttcagcatggaagaggagtcctgatcaggcctcactcctccccctggatgagaccctgccttttttccctaccctcctgtgagactgtcctgtccaggaaatctgggggaagaggagttgcaatcaggccccaaccctgtaataggcaaggaggaggaatcaggtgaggccctgccccctttccattcgtggggaagaaggcaggagagagctgggaaatcacagttcatcacttgagcatcatagccttacccctcgcccctggtcctactcctgcctcggtgatagaaggaggcagggtaagggtatgcccctggccactagagatccttagaaacaggtctctgaaggaaaggagatgccaggatgctactccattccttctctgggaattgccagtccaacttttcctggcactggaagaaaaaaaataagtgtcccacccctggagggttaatccctatctcttccttttgacccctgacttgttctggcaaggaacagaagtaagggtgtgatccagcccgtccccctgggacccatcccttctctataggaaaagctcagcgcaggtattacaggtatggaggaattactaggctctgatctcccatgtagaggccccagtcctaaccctgacccttagcaggacaccgtgcaagcattccattcggcagggaggatcagttccttagctccctgccttaacctaggaccaacctgggacctgacctgtgaggactctgtgctgaccttattcttggggaagggaacagattttgacctagatcaagtgtaacttaggtcctcacccttgggacgaccttgccttttctgccttgaggggcagttttgggagatgaaagggattagtgtggacccagtctaggcaccccagtacttcccttcaccttgtagaaaatggtaatgaaagggcatgcccaggctctttagcagcccagggaaacagagaagtctcccttaaaggcagggcctgggaggaatggtggcaaaggtataatgtatccgtgttttgtttgtgaattttttattgaacccacccactcagatgctaagtcaaccctgacctctgccccatccacaccattctccattcgagagactacccctgtttcagagccagtccccacctagtcccgtccctgccacctacacccaaggtcttcagctttaagttgctggggccaggccccgaggagggtttactgaggggtctgtaggtttgactaaaataataaatgctaggcgtgtttgatgcgcttttaactttggcattgagtctcccgttcttgtttttaatggtgcaatgatcatggccccctgtgggtcaggagaaatcacaattctagaaaaaagtagaacagatttcagaggaccaaatagagaatttttagatagaaggagagcccagagggaaactacctgtaagcaaaagcaaagagcctgccatggatcagctgaactgctgtgctttcgcctcgttgatttccctgggggtattgctctgtatgcccgtttccttgccattcgctggtgggagaggcagtaccttctgcagacaggcagcctgtaagtgcgctacgctggaatgccatgtgcagagagagatacttactcttccttacagggctgtagttggagacccagctagccctccaacactctgccatgtccccagccttgcaggctcgctgataaagtatgtgaggtattcaacaaaaggtattcaagctcccacagacacaacaaagacaaaaacaaaaccagtgcaggtgggagcaagcattgccaccatg

SEQ ID NO: 35547 - DNA, 1465 bp, Mus musculus
tagtgggagcttgaagcatgggactccataggtccctggcctccttggcccagcatgctgggactggcctgtctctcctagttggcctcttgcatgcctcttcccttgggccctcagaggcagcttaaagctttctatagtctgacatttgaggtctgtctggtctgacaagagttaagagttcctcttctctttggttgtgttgtgcaagtttgggagttcagggaagagaaccctcatctccaatttagcctcgaggggcaaggttttgcccttcaacaggcccagcatttcccggatttggaagcttggaatgcaaccctgggctggcttaatgggctgtggcctctgtagtgacctgctaccctcatgctttggctgagggggtcaggctgcttctcccaacacagagatagcacaaacactaccaccccttttccctggctagctgctggaagtgagttcccaccacctgtcttctgctgggcctccagcaaactctagcaatagcagctgctgccataccaatatgcaaagccttggaccaatttgctgcagcatatacatctgctctgatcagatgggccacatctaactactctcttctctgatgtgctttcttcttgggttggtctggagtctggacctgctgagataagagactaacatccagcaagagctggactgggtggtgagatcatgggctggtttcatattcttgggcagaagtccagaagtagtgtgggcagaggactgaactgttcctgacccctgggagagatagaagatatcgcctccttctctgctgtaactcctttgcacactgtcttctcctccctcttgggtcaccttctggatctatgctctcgactgaatctcatgtcatctcaggttccctgtctccagctctgtccctctgaagctggcagctgacaaagatgaagttttcatcagtcaataaagcctaagaggagagatgtggactgagcatctactgactctgtggattgactttgagggctgggtttggctgaggggttaagaacactatggtctcaatttctttcagtcgaagagaaattcaacagtgaagggactggtgtgggtagatgggtggctagtgctctattttcgaagatgtggattatggagaaatgaaaaagggtgctttgaagagtttgtctctgtaggcagtgaagccagccagagggtcctaagcctgctggaccttagatactaatctgttccagatccttcattgctagaaggagaagccaagatttagagcaccatggagttactttgaggagcaacttaagcccatgcttcctgatagcaaaaaacctatacatttttttctgagtttggtaataaccccctttctcatggatagtgcctctgctgttctcttctggataccagctacaccaggctagtatgtgagtgagttgtggagagccctgtg

SEQ ID NO: 35548 - DNA, 1204 bp, Mus musculus
gctgtggggtacttggcggtgccgccatgactattctccccaaaaagaagccgccacctcccgacgccgacccggccaacgaaccgccgccgcccgggccgctgcccccggcgcctcggcgcggtgcgggtgtaggcgtgggtggcggcggcacgggtgtgggcggaggagagcgcgaccgtgactccggcgtcgtgggggcccgtccccgggcttcgccgccacctcagggcccgctcccggggccgcctggtgctcttcatcgttgggcactggccgtgccgcctggcgcagtcgcgggccctcggccacagcaggcttctccacctccttgtgggggccccggtggccccggcggcggtcctggtgacgctcttggtgcgacaactgcgggggtgggcgcggcaggggtggtggtgggcgtgggtggtaccgtgggcgtgggcggctgctgctcggggcccgggcacagcaagcggcggcgtcaagctcccggcgttggcgcagttggcggggccagtccggaacgtgaagaggtcggagcgggctacaacagtgaagacgagtatgaagctgccgcagcgcgaatcgaggccatggatcccgccactgtagaacaggtaagggctggaaggtgaggggctgttgggcagaaacagcgagtgagtctaccaggctgagaaggagcgcaagaaaatgtttgagattggtccaagaaacccaggtcttgatgctgggcttgacattctttcctggtggtggaggcatggcttcccccgaggacttgataggggctctaagttaagtaagttaaagtactcttttgcagtcctgagatcttctctaagtgactggcattgggaattccccaggagtcgcagatacgatggagcccttccttagaggaagctctcaggcctctctaagggactttggttcagtaactttttcctttaggacaagtgtgagattccctcccgcaaagaactcgaattaaggtggtgtcctcagagaaatagtctaagcatacccaagaaacttaaacccttgatgtaggaaggacctctctcttttgctgagtctgctcaccagccatgtggcctcctcaggagtcctaagcctgtatttggggacctagacttgcttgtagaattgaaggtttagagtatacccacacaccttttagatagtgatttccaaagta

SEQ ID NO: 35549 - DNA, 1150 bp, Mus musculus
gccatagaggagcaggtggctcgagaatcttaccttcagtggctgagggatcaagagaaacaggcccgccaggtccggggacccagccaggtgggtcatggactctgtcattggcctgaccaagacctgttacttcttatcttttgacccctaattgacagggataaaataagagattttgacatctgggagaaagggaagctcccagccccatctctaactcatctcatctttagtcttggcatcgtaccttggaactctcaacacttgattttaagaagtgaaggagagccagctcttaagaaacgaagagagcagctaccactgctggtagcacaaaggaacaatggatagctacaaagagagcagctttttttggaatccctttgcatgctgcattctgtcctgaggatatagtctttccttcactatcttcagtgatcctgtctgtctgttgaggcagatacggcattggtcaggcctgtgactctggttgtacaagaccaggagaggtggaggatccagtcggttgtatttctaggatagcaagcagggaggcaggcgcctggggaatcacagagggctttagaatgactaaatggttccagaagctgaataatctgatcagcgagtatttactatacgcctgtgacaggaagcaggaggtcctattcctagtgtagcgggctacattgtgaacctagcaggccaaagtacctatccttaggctactcacagttttactaagtgaaataaaatgctcataatgaataaattagttggaggtatggtggatgaaaaatggacacttggtacaggggacaattgagactgagtggagatggtctgagttcacggtattaaacagtcgtcggggtaggcctcagcagatgaggtgggggcagcctataaaaaggggatttggtagctgggggtgagggcagtggagttggtataactcagagtctgtagctgaacagaacgagggtgagatcagggtagtggggctaggttggatggtgacttgtgaattctggagaggactttgattttgctctcaatgagacagaaaccatggggggtgggctgtaaacacaaaaaggattcgagttaggacttgacaggatcaccctgaccgattatagagcaa

SEQ ID NO: 35550 - DNA, 3132 bp, Mus musculus
tgagggaaaatttcaggccccaaagattttctccacagtgggtctagtggggcttcacagagttgagggagtcaatgagtgattgggacctgaacggacttttccagagccagggatcagacagaaatcagggaaagtgacctgaggccccccatcatcgttgtcctcttctctctcctgcccagcaggtctgaatgattgggacgatgatgagatcctagcatcggtgctggcagtgtcccaacaggaatacctagacagtatgaagaaaaacaaagtgcacagagagccacccccagacaagagttgatggacacccagggactggacatcattcccgatcccccactcctgccctttgatgccacccaaacttctttggctttcttccctcttggcttccttcttttgtttcctcttttccttttttttttccacttccctctggccggcccacccatgcgctccatccatctcatccctgccaccaccattggtctctgccagctgaagtgccctattgcccccgcacagcaccatctcagcattccacaggggactctggaaagggtgcggaaggtaggcaagaggcccacagagacagaccatctggcagccaggcagccccagaagagagacattcagacaaaggaagtcttctgctcacccttccttaaagatcagataaacttgtcatcccttcccagcaatgatgacaggaaaatggaagtggcaagttttccttctagtatccgaagaatctgagccttcaatgttaaaatttttcttaattaaaatgtgctttatttcacaaaatcaacaaatcaaaaagaatattcatggcaacgttggtcctttgagggtggcatctctggtttggagctaggcaggctggccatgggacagaaagggcagaaaaaagatggatttctgctgtcttttggcccctagttccttggaagggcaaaggctatgaggtagagggaggtgacaggcattgcaggtggcagactgactttggacagtgagaccctgaccttgctgcattgctttgccttcaccaccgctagtctgtttggaaggcttgaggtggggtgtcttgggaaattagggccactacccaagatttgaatttagggagtgggagcagcctcagcagatggggcacccgtgcactgcaggtgttgacaagatccaccatctgtaatgtccttggcacaataaaaccaaatgtcagtttccctgagcaactctattctgtgtgggacacgggtggatgggcctctgggaagcacaggatttgctttgaccagaggtctgcttgttctccagtaggtgctctctgtaagctggggttcatatttgatcttctgtttattaaattaacttcttgtcttgagactgatggcagagaatctctagagcccaggtgggttaagactaacctaacccacataaccaagattgtttcttaaaagaacaaaaccaacaacaactctacaactggtcgtggtcatgcctttgatcccagcactgaggagggcagaggcagaggtggatcttttgagttgcaggccagctgggctatacagcaagacgcttttattaaaaatcataaacttcagaaccaaatcgactgaaactgaagtccctactcccacctaccatatttgcattagggagcctagggctaatttaaaggactgtatgagccagaggccaagactggtgtctgaatttctactctcaaccttaatgctcattcattcttgtgataatctgatgaaataagcaatcactaatgagttcagtgaccagaggtggcccttgcccaactgggttttaaacgttggaggatgaaatggctaaatcctttttttgttgtttgttcctcaggtctgttgacacctctgtccatacccctgctagggtttgtaaagcccagctagagaaggctggctggccctcaggtttcctcagagcagtcttctcccactccccaatgcctcagtgaggtcctttcagaagaaggctgtgtagggtggccctacggtgagggtatggcttgcccagtgggtggctacaggatatctgaaatacgtggtcaagcatgagcacgccaagagggttgattcatttcaaatctacctgccttgtctcactgtgtggctttgggctctctttgactttaaagtgtcccatctgcaactacaggggtcattaatgtctgctacctcatgctctctgatttgtgagtattgacagagaatgtgtatggtcaataatgtactactgggaacagtacctggtacactcttagagcacaaatgttggggttcttaccagactttaggggtgggggtattaccgtattttgtaagtttgtaccatttggcctcagcctgactcttgctactcttggcttttacttgcaatttgccctaaccctatcttcagcaagacaaagggatcacctgaaaaaaccctgtgtgatcccattggcactctcccttctgtctacgactattccgaagaactgtactataaataaacttctgggctggggctgtgatgcttacttatcttgtttgtgtgtgtcttaagatctcccctccactaaagcctgtcaggatcatagggagacacctagggatgctggctgagtaagggacattatgtgttaccttttctgctttgcgtgtattgtctgtgcctgtgactacattgagtcttgagtcaaccagtttctctgaattccagtgtctctggttgagtgtggatgtgtctgtttccgatgaggcttgtttccaggtgtatcagatggtgactgagtgtgggactctgcctatgacagtttgtgtctggtatccgagagaaagaaatgcatgtttgcgtgggtctctcagtgacagtacatctgtagtttgtctggatactttcagtgataagctgcgtgtctgatagtgtgtgattgggtccggcttttgttgatttgcttatctatgtggtgatttagagcccaaggatgactacgtacctgctttggagcagtgcgtgtatgtgtggaacaactgtatattcttgtgacagactctgggtctctcatttctggggcagcacaaatatttctgt

SEQ ID NO: 35551 - DNA, 1878 bp, Mus musculus
ctggggtgtagtactaaaccaagcctttggtgggcttctggtggctgttgttgtcaagtatgctgacaacatcctcaagggctttgccacctccctgtctattgtgctgtccactgttgcctccattcgcctctttggcttccacctggacccattatttgccctgggcgctgggctcgtcattggtgctgtctacctctacagccttccccgaggtgcagtcaaagccatagcctcggcctcggcctctgggccctgcattcaccagcagcctcctgggcagccaccaccaccgcagctgtcttctcgaggagacctcaccacggagccctttctgccaaagtcagtgctggtcaagtgagagctggtggtggttgggggaacagggcagggggttgggttggagggggttgggcttctgcaggtccaaaaagttgttgccagggcctggcttttgtgggttggaggtttattttctcccataattctagagggatatggaactagggctgaatgtcacatgaacgcttcctgatagatggactctcctctcctggaggagctttttagagctgcttcctctgccttgggctaacctctttgggaacagggttggggtactgctattccaggcctttcccccatgaccctgtgctggagatgtcctgtctcgcatgcctgggacagtccctcccagccatcctgcagactggataaaagccctgcagctctccaataacgactaatgactcctcgtggggttcatttcctattgtatgaggtcttctctcctgcaccatcaccctggatcatgacaacagcgtggtctctgctgtggctttggggcagtttccccggtacagagacccttgaagagcaatcagcctgttgtaagtgcccggaacgaggagagaggcacaagctgaggatttcgcatcagctcatcttggggagggtgcaataagtgccatttgctttccaatagtttgggatggagatttgtttgtgctatcattagatcaatgatccagcgtgttgggaaaatggggaggggaggtccttgaagtggctgaatctcatgtaattgacgagacagaggcgaaggattctcttcagaaacatccagacaaaaactaaagctgccgatccgcctgcagctccattggcgtttaaaacatcctttcaggatgggtgtcagaattgatgaaacatggaacctgcgcccctgcactccccaaagcttattaactccttaactgtatcccagatgtgtgtgtgtgtgtgtgttcgcgcgcgcgtggggatgtgtgtggatgtgtgcacgcacacttaagtgcatgcatggaaggtgcctgggctgtctttgctatatgtaaatagggccactggatctttatttttgattaatttgttctgattttttttttggtttgttttttaaggaactgtaatgaacaaatgtcaggatacccaatgccaaataaagatgatgtatttatttagtccatgtgtagctttctgacccaggggcctgctctttccacataagcaccattactaactccaagattagtagcttactaccagcctcgcttgcttaggaaacccacccaccggcccaccccagctttctgtgtttctctttccttcccattttcaccacaggttgctcaccaaggtgaaggggtcgtagctgctggacttgaagatgctggcctgtcttcgttctcccttcttgccctggcccaactgggactaaactcttatcagtattaggggtagggtgaggtagacacgggaactccctgtccttaccaacccctgccccacatagggctgacatgactaacctctgttaatgggcccacctctactcct

SEQ ID NO: 35552 - DNA, 1202 bp, Mus musculus
actcagagaaccctgtcttgaaaaacaaaagcaaaccaaaaagaaaaaaaaaaagaagaaagagcaaaagctgggcagtgctggtgcacgcctttaatcccagcacttgggaggcagaggcaggcagatttctgagttcgaggccagcctggtctacaaagtgagttccaggacagccagggctacacagagaaaccctgtctcgaaaacaaaagtccatgtggccgtattacagctctggggtggaggcccaggcgtcaaaagaagactccgtccctgtcactttctcctttgctgatgtctagatctttttacatttgctgttttttgttactgtcactaattacattttaaattatttttatttcatattttcatatatattttgatagtatctttcccttctctacctccactcagatcttctcttcatccctatccacttcattttatcttctgctgtttctttcttgagacaggctctcactttttagccctgcctgtcctggaattcactctgtaggccagggtggcctcgaactcagaggtctgcctgccttctctgttatccagatggactgctcccaggttctgacatgtgtaaacccttaagtggatgggataactcttgtctcttggggtccagttgcatatagaggcatagaaatttccactgtgactgttgcggtgcgaatgggctgtggataagtgctgggattaaaggggtatgcttccacaccttgcttgctgtttgtctttcaagacagggtctcacttgtatcaagtagcccaggctggcctccaacttgctatataacagtggcttgtcctgtgaactgatcttcctgccttagattcctaactgctatggggaaccagtggttttctttttatttgtttgtttgtttttaaaaataaggtctcgggctggagagatggctcagcgggtaagaacactgactgctcttccaaaggtcctgagttcaaatcccagcgaccacatggtggctcacaaccacccataatgagatctgacgcactcctctggtgtgtctaaagacagctacagtgtacttacatataataataaatctttaaaacaaaaaaaaaaaaacaaaaacaaaataaaaataaggtctcagtattattgtctagactgacttcaaaatcctcatccttttgtctcccaagtgccagaattg

SEQ ID NO: 35553 - DNA, 1633 bp, Mus musculus
tgccccgaggagaggcggcgggtgcggtgcaggagctggcgcgggcgctggcgcacctgctggaggccgagagacaggaacgcgcgcgtgctgaggcgcaggaggctgaggatcagcaggcgcgtgtcctggcgcagctgctgcgcgcctggggctctccgcgtgcctcggacccgcccttggcccccgacgatgacccggacgctccagctgcacagctcgcccgtgctctgctccgagctcgcctagacccggccgccctggcagcccaacttgtccccgcccctgccgctgcgccgcgaccccggcccccagtgtatgatgatggccccactggcccagacgtcgaggatgccggcgacgagactcctgacgtggaccctgagctgctgaggtgcggggaccaagggggagggagggcaagggcagagggcttcatgcactgggggtaaaatcactactaaagtgctgcgctggagcctgagaagtgaggtcgcgggtcctgagtacaaggggacggaagcccagggacccctgactggtgggacaatgcaggagtaagggctccccggagtggtggtggatcggtttctgcaggaagtggtcctggtggtgggcagtttctggaatggaaggccgggacctctgacttcctcggaaagtagtggtgagttccgcaggctcgagtgagggttacaagccatacggaattagaaaattgccttgtccgggttctgaaccacagcgatggcaaatacatcctgaccgcattccgcaatccttgcaggtacttgctagggcggatcctcaccggaagttcggagccagaggctgctcctgccccgcgccgcctccgccgatctgtggaccaggatttgggtcccgaggtgccccctgagaacgtactgggggctctgctacgcgtcaaacgcctggagaacccctcgccccaggcgccggcacgccgcctcctgcctccctgagcgctgctgcatcctgcacgccctggaacccaggagcgccccagcaaccctgactccctgccagcacgtccaaggctgcttaccccagcaacctcccatcccctgagccctcaataaatgccatctgtagcagctgtttgtctgagcgccctgtactagggggccggtgggctgggtgacaatgataatggaatagtggctgtcctactgaggacagcacagtactgtttgggacctgtactggtaaggaatacatgcctgcttcctctggactttgcgggtctcaccgggtgcctgggctacccttctaggcttcactgaggcgggttccctgggaggctctgaggttactttcagcgtctgccaggggtccacagcacttagccaaggggctatggattcactcgtggtctgccaggaccaggcttgttgtgagggccccaggtggatcacagacatccagcactgtatcagcaactgccaagcactgcttacacggggctctgaatattcactccaaccattgcctttgccctggccacttgttctattctcagtatgtgcaagtttttgcacttcatagtcctttcttacccttcctgtcactgtcttgtgttggacaaggaaggaggttgttttgtttgttttga

SEQ ID NO: 35554 - DNA, 1141 bp, Mus musculus
cagtggtggtgggtgcaagtggtgttggtaaaagtgctctcaccatccagatgactcaccaatgcttcgtgaaagaccatgaccccactatccaagattcctactggaaggaagtggccagggacaacggaggctacattctaaatgttctggatacatctgggcaggatattcaccgggctctgcgtgaccagtgcttggcatctggtgatggtgtgctgggcgtctttgctcttgacgacccctcgtctctggaccagttgcagcagatatggtccacctggacccctcaccacaagcagcctctggtactagtgggcaacaagtgtgacctggtgaccactgctggagatgctcatgctgccgcagccctccttgctcacaagttgggggcccccttggtgaagacctcagccaagacgcggcaaggtgtggaggaagcctttgccctgcttgtccatgagattcagagggcccaggaggctgtggccgaatcaagcaagaagacccgacaccagaaagccgtgtgtagctgtggctgctctgtagcctgaagatctttgtctagcaaattgacccttgtctcatgtcaaggtgacaattctcttgtaataagatttccctctccgaccaagttaccacagacatctttttattgtcatttggtgagaagttacgtggtaacatgggacatccctcattgactgtgttttatgaaactctatgcaaaattaaataaatgttctcaggattcaaagcttcctttatactaaatctttgtttttcttttcttcttgccttttctggagacaggttcttactatgtagccccgctggaagttcaagagatcttccaggatagccagagctacaatagtgagactgcttccaaaaggaagacaaagttgaaaactcagcagttaggatttttttttttaaatagagtttctccatgtaactctcctggaactcactttgtagattagtctggcctttaaggcacagagatttacctgccactgcctccagtgtgctgggattaaaaagacatataccaccgggcccaacagcagttaagaatatttttaaaaagaaggagccaagtgtggcagtcacctttaatcccagctctcagggaagc

SEQ ID NO: 35555 - DNA, 2315 bp, Mus musculus
tgctctagttctaggcttgtcatcaagaagttgcccccaacagccagtcctgtatcagctaaggaaatgaccacaccgaaaggaaaggttcctgaagaaagcgtgaggaagaccatagcagcactacctgggaaagagtctactctaggccaggctaaatcaaagatggctaaggctgtgcttgctcagggccagtcctcagaacaagctgctaagggaactacactggatctggctacctcaaaggagactgtgggaggagccacgacggacctgtgggcctcagcagctgctcctgaaaacttccctaaccagaccacctctgtggaggctttgggagaaactgagccaacgcctccagcctcgcatacaaacaagcagaccacaggggcttcacctctgcagggagtcacggctcagcagtccctacagcttggggttctcagcactttggagctaagcagagaagcagaggtaaagtccaccacatctgggaaggaggtagaagggctaaggactgggctttctcagatacatcttttccttctgtgtctccaggaagcccatgattctgaggagggcctgctaggggaagccgctggaggtcaggacatgaacagcttgatgctgacacaaggatttggggactttaatacccaggtgaactcagggagctagggctatgactattgcttcttggccattcctgccttcagggaggagcagatgatgtataacgggaagacgaaatcctttccttaccccatttttctgccccctctaggatgtattttatgctgtgaccccactatcctggtgtccccatttgatggcagtatgccccattcctgcagcaggcctagatgtgtcccaaccttgtaagacctgtggaacagtccaggagaactgggtgtgtctgacttgctatcaggtatggaacagaagaggggtattgggtagagattgggcccagcagcaaacttcagctggtgccaagcgacctgtgacaatcactttccaacctcaggtgtactgcagtcgctatgtcaatgcccatatggtctgccaccatgaagcctctgaacacccgctggtcctcagctgtgttgacctgtctacctggtgttatgtctgtcaggcttatgtccaccacgaggtgagcctggcaagttgcttaacccgtgcacactgagccctgtcccccgtcccctgtatcccttctaccatttggtaaggggagaacactattttgcatggctgccccatagatatttgcaggagggtatagggtagtctaggagaagcagtagttgaaagctgctgctaccatggtgacagcctctctctggctgaaatagagccaccctcactttgacctaccttgtccttcctttgtcctcaggatctccaagatgtgaagaacgctgcccaccagaacaagtttggggaggacatgccccactcacactaaatcccagaccacactgcctgtttcccttctgaggccacaggcagggcagcttagttcaccgcagtccgtaccttggataaggggcctcacttgaacccatcttgaataccctttgccaggtgcttatttaagtacaaatccttttcaaaggactctagtgttcagttgttgatgtgcccctgcccactgcctgctcgaggaatacctctgttctacccagaaggagggagggacagcttagtagccctaggaaggagctgagatcacaaggatgacattgaaggagacaacggggcagtggcagcaggtcagcatatttaataaagttggagttgctacaaaacctgaagaaagtgctttttttttttattttgaaaaacccgtcattcctagccagcacaactgagggaagaaagggaggagagaagaaaggagaggtcttcatcaattcaactctatccattgccccccccaaaaaaaacaatttaactaaaattgaagtaggcagccagattggctctgctggagagtaaatagaattcgtgagcaaatgagtgcccagcatagaactaggaggctcaccagacatgatggtgcgtgtgccctttatccccaaacttggaagacaaaggcagttggagttcaaggccagcctggtcagttctaggctagtcagaagtacttagtaaaaagacatgagaactgtcaggatgtagcctcctgggcctgtttccccatcgacctcactgactgtttggggagggtgaggaaaggaagggttcaaatttaacttcaaggtctagtggctatgggtggcagccggagcaaaactgcagtgcctcta

SEQ ID NO: 35556 - DNA, 1233 bp, Mus musculus
cctgaacaggttatcccaacagaacccatgcctgggctcctagcattagaagagtccctagccttaattacttgttcaggtccatagttcaggaagccaaggttggaccttcattcttagaataatagcagtgctttctcattaactccatggtcctgttgcccagcaacaagtgcttccaaagaccctagaaatctagcagtggcccactcctaggccttactgtcccaaggtgctaaaaagggctatctccctccccaggatcctaatcgtggattgggatgttcatcatggtaatggaactcagcacatatttgaggatgaccctaggtgagtgatgggactgtgggtaagagtatggtgtgagaggatgctgaagcatcctgcagggatgttcatagcctctaacctgctgtggcccctttctcatcccaccctctccctggcagtgtattatacgtgtccctgcaccggtatgaccgtggcactttcttccccatgggggatgagggtgccagtagccaagtaggccgagatgcaggtataggcttcactgtcaatgtgccctggaatgggccccgcatgggtgatgctgattacctggctgcatggcatcgtctggtacttcccatcgcctatgaggtaaggctcaggttattatataacattgctgtatctggcagcacacatctgcctccttgacgtgtgttttgactaccaggtgactaatcctatgatggctattgggacagggtggtggggatggccttatgtatctgtctgcctatgcatatatgggtgcctgtgagtggcctatctctgtgacattttacacgtaaacaactgtcttggctctgtgtatatatgcatgtgtgtgccttctgattctgtctgctcttctgagtgcatggctgtaagggtatccctaagagatactgttgtggaattgtgtagaatagaagcataagattaaatacattatggatatgtctatgtaatgttatatagtggctgtcatctcctttctgtgtgtgataagtgtgatagtgtatgtcattaaatgctgctgtcttgtgatagcctaagaaagactctgaatatggaaggccgtagtgacattgtcacccacacccgtctaactgggtccacgtgtctatatatgaatctcgctggctgctttgactcaggggtgacctagctgtgtgtgagctaaggacagggccaatggcgtgt

SEQ ID NO: 35557 - DNA, 1099 bp, Mus musculus
gagatcaggtaggtggcggggcgtgggggggggtgatcagcactagacctggaatgagctattagaggctattttcttccagctctcctcttgttttcccgggatgcctcggtgggaagggctgtgtggattttaggttttatgtccaggccatgttttgtctcaagagtgtaatgggatccagattcaggaaataaggtgatctgagtacccccttttcagttgagacccaggaggaagatgaagtggaagaagccgtgctagaagaggaggaggaggaaggtggctgggaggccactgcactgcccatggatacatggccactgctccagaaccgcactgggctggtctatgatgagaagatgatgagtcactgcaacctctgggacaagtgtgtgctcagagggctggggtgggtggtgtttgggtcactctcctcagtcactaaacccttggctctgcttctccacactgttagtcatcaccctgagacacctcagcgcatcttacgcatcatgtgtcacctggaggaggtgggccttgcggctcgctgtctcatcctacctgctcggcctgccctggactctgagctccttacctgccacaggtcagaccccgtgctggggggaggccggctgtaggattctagggatgttccaggagtagggcctagggctctccaagatgggtggagccacctagacaggttcaagttcttatgtgaggacaagctggcgactcttgttcctctgcatcaccagtgctgagtacgtggagcatctccgcaccacagaaaagatgaaaacccgggatctgcaccgtgaaggtgccaactttgactccatctacatctgccccagcacctttgcctgcgcaaagcttgccacaggcgctgcctgccgcctggtggaagctgtgctctcgggagaggtgcgtcttctctgtgtgctagtgaagtttagctgaagaaatgaggtcctgggaacatagagagggactacctgctcccactcaggaggccagaggcaataggagagtctgctgggaggggaaccacggagtggatggccgagtggatggcggacaggagaaagggaag

SEQ ID NO: 35558 - DNA, 1194 bp, Mus musculus
gaatttgggatacttactgagcagataagccagcctgggtcacatacagagtgagacccccactcagaaaaatcgagaaaaacaaatcaactagagggaagcttgaactgcacggcaggtatgagacctgagctgcatgagagcaaaggagagagtgagagcagggagataaggaaaggctgggagagggagggacagagggagaggaagaaagggagggagggggagagagaggaagagagaaggacggaaggagagggagtttacaagagtgagcaagaggtcttgttccataggatctcagggctagcctgtgcttccggcaccagtcagggcagctgtttctatgagggtgtgaacctgggttcttttttcaaggtaaggccaggaacctgtgtaagagcaattctgagtagacttgctattcaggtaaggggtgtctgcaaggtgtgggagctgagggctgagctgctttggggacttttatagggccatggccattctggacagtctctgaaaggaatataaactattgtgattaatttttatttttgagatcctctctctctctctctctctctctctctctctctctctctctccactatatgtatatcatttgctttgtagccctcaatggccttgatttcaggacaatcctacacttcagttcttgctcagtgtttcaaaaatgtccagtttatgtgtcgtcacactgtgtcaacgatagcccagtcatgcacaagcacacctttacagccttccatgtctcctcacctgttattgcacgcacagctccacatgctgttttacctgcaacttgatgacaccctgccatctcccgccacctcatccacaagtaatcagtcatccagcatcttacgatgacatatggggccacctggatgccgtccacaaggcttcagatacacagttccgttggtgcatcatgagtttcagttgtgacatattatacctgcaacctcatccagtagtcatgtgtgtcattcggatattgtcatcaaagaaccatagacaccgctccatgctccacttgacactgacatttatttaaccaaataccagcgcatgtctccaggtggttttattttacaaaatctttaagggtgcagggcaaggagatggttgggctgtaaaggccagtggctctaagaggagggagaaacgggcacg

SEQ ID NO: 35559 - DNA, 1144 bp, Mus musculus
ggcggtggtggcgcacgcctttaatcccagcacttgggaagcacagaggcaggcgaatttctgagttggaggccagcctggtctacagagcgagttctaggacagccagggctacacagaaaaaccctgtctcgaaaaaaaaaaacaaaaaaacaaaaaaacaaaacaaacaaacaaacaaaaaaagaagcaaacagtattgaagagaagccattatgattcttgctattattcctttgagacaagatctcagtggagtccaaggtggcctcaaacacagcattttcctgccactgcctcccaagtgctgggaacacaggtgtgcaaccaccatgcccagctctgactgtaactgtcctggcaggggctgagatattctgagggccacttgttcctgttcttctactatcaggctattgagaaaattgagtcaaagaaactggaattttcccaggattctaaccccaggagaaggaaaaaggtaagactgacgccaagtgaaagcttctctcctggcaagagtttcacatagttggaaagcatatcagactaccacggaaatcagagcccagagccgatatagatatgtgtcaaagatgggcaggcagcccctcacctttgaccagaactgcttagttaagggtaatcttgaattctctataaactcaaaccttttggcaggaccctgaaaacagacttgagccatttcttcagtcccagatctttactttcagtgtgtatttttgtatcatgggcctgttctattctctaccattttattatttatttattgttggtctttcaagataggggttctctgtgtatcccttgctgtcctggaactcactctgtagaccaggctgaacctcagactaacagagatctacctgcatttactacctcccctgaattaaaggtgtgtaccaccaccacccgggttacctcttatttcagttttgttttgttttgttttcctaaattgccaagtgaagtacagaacatactacaatagtgattgacactcaacaatcacaactgtgtcttaatctcaaaatggtaagagtgctagtgtcagccgggcatggtggcgcacgcctttaatcccagcacttgggaggcagaggcaggtggatttctgagttcg

SEQ ID NO: 35560 - DNA, 1136 bp, Mus musculus
gaagtttccagatttactggagtcatttcctccagggacattacgctctttccccttagccagcattggctgcttcgtactcgactcagtgaagcaggcaaatgagtttggactttgtcttagattctgcacaaatctgacctttggtaagtctctcaccgaccagcttttgcctgcctttttgcctttgggatctttggagcaatttggagttcttttgattcattccctgctgccatttggtgaatgattttgttttggatactcttgtgtcgaagactattgggttacggttattgtaacgtagagaatggtggcaaagcagagagctctcaaaagtattggggacctgagcagaattcaaagtcaaggaccacaaagatagggtcctgtgattggaagcttcagggaggcacgttctgtttcctgtcagctggaggagagaaggtggcttgggtttctaaatttacaagtgtcttaaagagacaggcccataaagttgattagggcatgtgtcatataacaggacaggtttgagtgctcttgagtcacttgtggttcggtggaaccatttggaataggtaggtctcaataccatggtttatataaccaggaaagtattctctgtactagtttggtagcctattgagactcaaagctgattgatcttttataaataattccgaagacagcaatggggtgggagacaacaatccctgtccttggagcttgtgaagaaaaccctggccacttcggttttgctttatgctctaaactcgctgtgccctgctaagcgtgattggcatgctctgttcatgtgagtgtgctttggttcattttgtcctacacagaagcaattgattctgtatctattccttaaagctaaaatccaaggatttagaaaacacggcggggctggagagatggctcagtggttaagagcactggcttgctctgccagaggtcctgggttcgattcccagcacccacatggcagctcacaactgtctgtaactccagctctaagggatctggcactcagacatacatggaggcaaaacaccaatgcacataaataatttttttttaagaaaaggaaaatgttccgggcagtggtggcacacacctttaatccc

SEQ ID NO: 35561 - DNA, 1210 bp, Mus musculus
ctggccccagaatgaagatcacttgaggactactttcagtcactgcacaccagaactctgtctggctcgcctcgatcctgttccgagcaagctcgtgtctatgtggatggtgtgaccattgaggacctagcaggctacatggagtattactgatatatccctaagaaaatgtcccacatggcagagatgatgtacacctgataacaaaaggctaattcatgagctttaaaccaatgaaagcctgtcagaggtttagttaacagcagacctggtggccactctgtgagaagatatctctttctgctcactgtgcttgtaataaaaactattcttggcatctcagttaatcttcattctgtcattttactgggttcttctgtacctgttaaggcaagcaggtcaaagaaaatctctcctaaaaatgttctgagggctgaagaaactataatgagtgggaactggcagcggcggggacatggtgacatcctatacgacagcttatgatatggcagcaagaaactcaaatgtgcgtctgtaactggactgaacacttgtcatgctgtagatgccagcccattaataatacagcttctaagactcgtttaaactgtctttggtttaacacggatttgtgtcatcaaaggtttcttacattactgttgaatcagttatctaaggtttagatgcagtttgaataaaccaggtgacctggtttttgttgttgttgttgttgttttggtttttcaagacagggtttctctgtgtagccctggctctcctggaactcactctgtagaccaggctggtctcgaactcaaaatccacttgcttcccaagtgctgggattaaaggcgtgtgccaccacttcctggctctggtaacacttctttttctttcctgccttttaattctgtaattggcagataaatcaaagtcatttgtatacttatatggtattaatgtgaaaagtcatttcagggtatataacaggggaatagtctggaaaatgtcttcaaacattagctcttcggggccagagcaatggctcttcttgtttttccagagggcccaggttcagttcccagcacccacatggaggctcacaagcctctgtcaccccaacacactcttctggtctccatgcatatacatacagatcccgaggctgtgtgggtggatatggaaggactaggaagagggattggggtgc

SEQ ID NO: 35562 - DNA, 1176 bp, Mus musculus
acgtgatgaaggattcttcgctaaggacatgcatgtattggtccaccttactttgtggagttgagctccattagtcagggctccatagagagaaatgcaccaaaaacacttctggtggtgtgctttggaaaacacttctggtggtgtgctttggcttctagctgcttcctcgaactcgggttcattggcagagtgatgtcagctgagacagagatggactcaggtgctgaggcaagacccttggaggacacgtgttgtttggaggcagtataaaaaggactccacagcccgtgaaagaggctgagctaggtttgcttatagagctagctgcgcaccacttgttgatctctttcttgtctttgctgctcttcacttctctgagagaggtacagctaagaactcccagcgttcctccagatccctcttgctgacttgtgccgaggctgaggcctggctggctctgctagctagtgccacccgctgctgattcctgtttgctgtaccgactctaccgtactggactgctggtgtatctgtgaagtgtttgcgagtggatcacgctgctgctgctgctgctaacctgggaactgaactactgattttccgacaacacagatggaagttgctccaaagagccatttctaaacaggtccactttccccatatcctttctttcccattacctctggttggtggtggactacaagggaggttaaagtgtctgagaaccatcattaaaaataagggttgagggctggagagatggctcagcagttaagaacactgacttgagttcaattcccagcaatcacatggtggctcacgaccatttatagtgagatctattaccctcttctagtgtgcaagcatacatgcatacagaacattgtatatataataaataaatatgtctttaaaaaaataagggttgaagttacagatttgagaaaatgcctctagaagatcagagtgtaagtaaattgatagggcattttcttttttcttttctttctttctttctttttttttttttttttggttttttgagacagggtttctctgtgtagccctggctgtcctggaactcactttgtagaccaggctggccttgaactcagaaatccgcctgcctctgcctcccaagtgctgggatcaaaggcgtgcgccaccaccacc

SEQ ID NO: 35563 - DNA, 1264 bp, Mus musculus
caaatcccccccttccctggctgtgacttcacagtggaccccgtggacatggagagtacccgaatggactccaactttggcctggctgggctccccggctcccccaagaaacgagtccgtattgaatgcaaatgtgggacaacggcttgccgaaaatacctcttctagccctgagaagtctgaggccagactaactgaaggggcctgaagccaccttcctctcctacagctaccctcttgtcaaggatgaccatcaatcagagccttgtctgcctccacttgtcctcacctaccctaacctgctctagggtcagggctgttgtgaggactaactccgggtacccttttcctgttcctttccccctgttccaggcccatcaggcattgcacttaaaactcccagccccattttcagaaacatatttttcacatcatgattccctagagttggaattcatgtcatataatggaggtccagattgaggaactcggctgtaaaacagattctttgttttggacagcatctctgcagctctatgtagtaagtctggtgtttggaccgttaatcttcctgtctcagccttcctcatgatgagattgtaggtgtaaacccagctaagatttttgttctaattgcatctgcttctgcttggagcttgtgtgtgacctgttgcaggcctcttcattactctaatggtatgaggaagcaaccccctggcagacagacatcagagctgagataccagcctaacatcaagctggatcagcaaccccagagcctttgtactcaggaaagaaaaggcaatcttcagagctgggagataaggctggttccgctctttgtgcttttgatgctggctggtattaaccttaagacctatagggtctcaacagttgcaagtctgaaaagtagttgcccaaatgccatcagaatggggatggagtaaatacctctttgaaagccccacagaaaggttagaactaagttttaccatcaggaagtacagtgctggacttgctggaaacccagccttggcatttgatggccactagaactactagaagctggaaccaagatctaggtattctttagatagcacttaagacagtaatgtgcatcgactagaaggcgatgtgatgccaggcacttggtagagcacctggtccatacagattgtctcagggaagccttgaaaaccacaaaggtggagcccagaaaaaagcccatgtgacagaaggcaatgtctaggccaaaaatacttgt

SEQ ID NO: 35564 - DNA, 2088 bp, Mus musculus
cagaggcaagcatacaggagacagacgttctgagctgttctgggaagtagggatacagctgtggcttcaactgacagaaattcctacccctgtgggctggcatcccaatagaggcaagcacatgggagacgaaagtacagccattccttggtgtagaatttgctttataatttttcaactttataaatttttgaccttccagtggtagcgaaccacacgcatatacccagttctggttttctcctttcagtatggtgttcagtaaattatgtgagctagtcactttgttataaaatagactttgcattaggtaagtttgcctaactgtagaataatgtcagcgttgtgggcacatttaaggtaggtgacactaagctagggtgttcggtaggttaggtatatttatgcattttcaacataagacagttcaagacagatttgttggggtctaaccccgtgtgatgaagtcacatctgtatataatagagttaaagatgagtgctaggaagaaaagcaaagggccagatgagcttgcacaaaagggaggggcaaagtcatcaggaagagtgttcccaaccagatgacagttttaaagatctgagtgaaatagagcctggaataatgtgattgggcggagtgtatgagatgatgggagacaggtctttgggacatcttgggccatagcaaggaaggaagctttccttattccctgagtgaggaaggtgaggaaggctcagacagcagtagggaaattaggtgcagaatgttaagttcaaccacggggctttcaccaggttaggttgtcaaactccccaacattggcagctactgtttgggtggaccccacacttgcctgtgcgttgagttgtgtcccacaagcagtgagcagaagtgtcgagttcttggagctagattagcatgcatacagccatgaactctggggctgagccacagttcctgctgtggggtggaagaaacagaaaatctctaagctcacccctgtctcctgccatgtctatctggggcccttatttcagtcctggacctgctcagagaccaaatactaatgttcattattgagtattggcaaggagataaattactaaatgactcttggtaattaggtcatgacgaaatgtgaaggtttgaagaatcaccaggagttcttgcagctcccatatgctactacatttgtagcaattggaactttggctaacatcctggaaccgctgagtcttgccaacctggtgatctatagaactaacagcagctctttgaggaaaaaagatgatttcctatttgtttcgtttcttgtttaagagtatggtcacttccagccaaaacatttctgactccatcagtcagattttaggcaaatggttattagattggaatgttagtgagctggactggtcattgtagtcaagatcatatatgtgtgccaacatccctaatccagcttcagggtcagtgatttttctatgaggactgtaacttactatagcaaagggtgccagacagcaattaagtgctaatctctttaaagaccctcccaaggttagcagttcagacctgtgcactggctcttctgtaccaaatggatgcacttattcagccaaggtctgggggtagcaacagaatttgggtacataacagttttctctaactttctccttttcttcactctctccattttctttaatgagtctggtttcaggatgattggtgatgaatattgtttgcatgattttgggggggttccttgtgcaatttttgaggtggcagagttgacattaaattatctactttaaattatcttggtgacacttttgtctcacaacctgaaggaaaataaacactgagcaaacaagaaagaataaaaaataatgttgctggttagacttgggcctctcttcatttgtccgccatcactgtacccctggcttgacatcagcattctcccgtcattccatcgtccaggctcctttacttccctctcaaatccagccttggtccatgtcctttatctgattttgaccttggatgtttgctaactgctacactactaagagcaacacggggactgag

SEQ ID NO: 35565 - DNA, 1177 bp, Mus musculus
acatggaggctcggcatggagtcacccaactagcagggacagaccccgaggctcctcctttctcccacccaaatggtcatgaatttgctttggcaggtggatgaagactcaggaacttcccagaatactgcctcaaccaatgagccaggcccaggttatggggcactggggctaagcctaccaggtgggtacttggtcagaggaaggaagcattctatgctgggcctttggggaactggcagaaccacatgctgccctaaaggtaggtcaggggtggggaggaaggaaagccagtgtcacttgaggtggtagttcatcatcaaccacaaaatgacaagagttggatggttttctagctgtgtgtgtatatgtatgtgtatagcagcaacaaagaacaaaaatagtagcctcatatttctgtaacaattgttctactttccagatagataactggaggtatattgtaataattagctttgccttggtgctaattattgccagggaaagggcccaggaggtccactgcaaagctttatggtcatgcagacattagtaaaactcaaatttgaggtccaaagctccccaaacacccagtgagagattaaaggtagagccacaacagcggacaccataggcagatcaccttagtgctacaattaaaggattgcgatgtccttgggcttgctgcatgctaggttagcagttttctatcaagatatactccagcctccaaaactcaggttttaggccctgtttccaggctttctcagttttagcatttaaaatgagaactgctttttcagtggattttagggttttaaacagaaaaatgtttaaaatggattaagtccctaaataatgcagcgacacacttaggccacattttgcattgaaaggcatacaggatatgtgctatcaaccaatctttccaaagcaagctctatagttaattagggcatgtgaaaaccagtatcctgatattgcaaacttcctaccaccttctcagctacagtcctcaccccttcaccctttgaggctattctacatgggccataaaagctctaaaaaaattcccacttctaggattgattgaaggcaagaaaaatattggtgagacctgatgagagttttataatcactacctgtttaattagcatgattacagtaaggctcttaa

SEQ ID NO: 35566 - DNA, 1209 bp, Mus musculus
gacatcaaaattctacctcttactattctcagatacacaaggaataacacttctgatccaggatcgtccttgcaaattgctgtatttataaagatttttggagctgcgctgaaacgtctgttttagtacatcaagttctatttttgaattgagctcccaaggtagtttgttaaagaacttttagaaagctccatgtgttctttaaacattttttcccttttaaaaacaaattttaagacatttgttacagtcccaatatttttccttttatcagaatttttgtttaggcactcaggattattgtttctggccaaaagaaaaaagtggccaggctaaatcagtttttaaagttgatgtgtatttagggacattttaaaaccttgtaaacaatgtttatcatggccagaaagtgatttctgaatgtacctatgaacaatccgagtcaagatcatgattgcttagagatgttttttattaaagatcaccatcctgattatatagaagagcttctttaaaatgtttgtgaatgtcattttttaatactggaagaaaagtattctgttgtgtctgatgtgtttaggatgtcctttatggagctaattaaaagatgaaacctgaacacaaatcaatactgataatgctttttccttattcaaacccagtttacaatttagagcgagaggcaagtcaggaagatgaagcttggaaaacatactgggatggatgggcaggaactgtcagaagggttgaggcttgaatttgaagttagtttgggtatatggtgagacatgaaatgtgatggatacagatgaaagtcagtccccttctgactagaattgggttttctgaaattgtttcttggttcttttcacaactattactttaagtttgcttttctgggtacaaggtagatggatatcctccttgcaagattgttctgagaagataagtgccttaatctcataacatgggcagtaaacttatacacagagtagtgcacttttcttttttaaagatttatttattattatatataagtacaatatgctacagattcaggcatcagatctcattatgggtggttgtgagccaccatgtggttgctgggatttgaactcatgaccttcggaagagcaagttggtgctcttactcactgagccatctcgccagccccatagtgcacttttcttaatggggactggagtggt

SEQ ID NO: 35567 - DNA, 1221 bp, Mus musculus
tcttaaacatgaatttgttcttgtgaatcttaaaataatttcatgcagtttcagggggaaaacattagaattctggggttttttttttttttgtttttgtttttttgtttttgtttttgttttttgttttttttttttggtttttcgagacagggtttctctgcgtagccctggctatcctggaactcactctgtagaccaggctggcctcgaactcagaaatccacctgcctctgcctcccgagtgctgggattaaaggcgtgggctaccacacccggcctttctgatttctatattagtttaaggtttggcaagtttgacaactttatgatgaaaatgtagtatgtatcatatatattatataataccacagatagggtctgggccagaagcccatattgaaatgcttggatgtgtctgcaggaaatgtgtgcacactcacccaaagtgggttatgtaaagactatttatagcctctgttagcccatgccaggttttctcactcgacaggtttgtgtttgcagaaatcctgtgcctgtttttaaacacactttcaatttccctactgtttatcagtatttcataaatggtttctctttccccgttgactccttttagcctttgaaagtatatttgttctctcactccctacctcctttcctcgtaccacccccgtttttctttgtttcctctcttctccctgcttcctctcttggtctcatacaatccttccttctctgccccccaagtaccagcattataggttttaggtatgggctactagtagagttggctggctgacactgtttgtggtcatactgttgctggagctttctatttatgtgtgccaggtttatcttaaagtttcttttcttttcaactccaccccacccctgcttttgttgttgttttgttttgttttgtttttgtttttgtttttttgagacagggtttctctgtgtagccctggctgtcctggaactcactctgtagaccaggctgacctcaaactcagacatccggctgcctctgcctccagagtgctgggattaaaggcgtgcgccaccatgcccggctcactcctgctttttgaggcaggttctcacaatatatcctatatcagctttggacttactgtgtagcccatgctgactgtcaacttgtgcctatctggctcacaaatatgagccactttttaaatatatatttatgattttata

SEQ ID NO: 35568 - DNA, 1297 bp, Mus musculus
tttctctctctctgacacacacacacacacacacacggtggggtgggtaggaggtaggggtagagggagggaaggagggttggggagaagaaggcaagaaaggaaaaaaagatccccagactcttgatttctgaaatttgtacctcgttatgtccgatttccaactttggtttcagaatgtgggttgaattctttgaagaattgccttggggaataccatggagtagagcctggcttgttttccttatcctcacgaggacttttccttctcttgcctcccacaggccagatatacggggatgtgctgtacttcctgacagagctacacgaaggactccagcatggggagataggccaccccgtttatttctggttctattttgttttcctgaatgctgtatggttggtgataccaagcatccttgtgcttgatgccataaagcatctcactagtgcccagagcgtgctggacagcaaagtcatgaaaattaagagcaagcataactaaagagccggagagtgggctgagtccctgctgatgaggcgctctcctcacttcccagaagactcaaatcttcttcctcctcgcacaggttgggggggtcagaactatcggacttgtcccactcaaacatgatgagtgagcacacaaagggccagagtcagaaaaggaagggaacaagttgagctactgctaggaacctgagggaaaagatggatgagaaggtggcaagtccgtgacggtggcaacttcccaaaccaggaaataaaatgtcttttactataacactgagagatatttaattactaatctcagaaatgtcatataacacatctctcccattacttcgtcatccataaacctccatcatcacatacatataccatgtctgcccttacaaacccttaacactgactgactccacacacagtcataatttaccctgtagaacctagaactcactctacagacctcccttcaagatcaccctattacttaccccataaatccttccagtaacctcatagtcctctcatatagcttggctgccgtaacaaaatgatatggattgagcgttttaagcaacagacatgaatgtcctcaggactggagccagtcagtcaaggtgtcagaaggtttgactttaatattttttttgaagtctctttccttagtactgcattctgtgttctcagatgttctcatatctccctgtgtcccctgcttctgctgtttgtattcgaacaactttcctcttaggacaccatttagattggattagggtctatcaagata

SEQ ID NO: 35569 - DNA, 1174 bp, Mus musculus
atccaacatatttttaaaataactctttttggtgtgctggaaatcaaaacctggggcctccccatgtagaccctcccatcaagctgtatactcagccccttaaaatgatctttaaagaagaagaaaccaaactgtatctggtcacccttgataagcacctagacccttcttttactcaggaatatgaaataccaaagatccctgggcaagagatgggttttccggagactcactgtccttgttgaatttcaaaatcatgacttgtttctctcccacagggctacggcatggcatacactgtccacaagtggtcagagctcagctgggccagtcactgggtcacttttggatgctggatcttctaccgtctcataggctgaggcatatgaccatcataatccccttcaatacccctccttagggtgccaactctgatgggggatgagaaaagaccctttctctactccttttcccttatccattcttgacccccaacacccctccacacaacataggaacacacacaactttctatgcctgtcaatcctcaccccgccaccaggcaggaagggggtggtccttattgggccaaggaacgatggatacttgggaaagcagacaggagcagatccagggcctctgcgcctgccgtctcccttttttatatgcagtttgttattgtcgaataaaagtagaacttacacaacaggctcggttttttggttttttgtttttttttttttttttcactgatcagaggggaaaaagggaaagcaaagaaattccaccacacataaaggtttggaaactgaaaatcgtggagagggaaaataaaattgtgatctattcgcgatgaattcaacatggtctgtgattggctaatgagtctatgatggcggggtcctggtcctgcttgcgtagagcagggacagattttgtgggggaggcttagtaatacttcatggaaaactgggggatccctgtactgattggttcgtcagattcgaacggggcggggtagggcaagacagaagaagggttgatgcctactggtccgtaggtaataattaaaatgacagtttgagatgatcaatattctgactaaatgctgacgaggtctgtttgccaacttgtttaccgtcatgccttctgtttggcttttaagaactggcac

SEQ ID NO: 35570 - DNA, 1174 bp, Mus musculus; identical to SEQ ID NO: 35569

SEQ ID NO: 35571 - DNA, 1232 bp, Mus musculus
ggcacttgcacacgtatacaaaataaataactgtaaaagaaaatttttagacaaattagttcttttaaaattgaggggttttcccctttttatattatttatttattttatgtacatgagtacactgtagctctcttcagacacatcagaagaatcagaccccattacaggtggttgtgagccaccatgtcgttgctgagaattgaactcaggacctctggaagagcagtcagtgctcttaaccgctgagccacctctccagcccaacaaattagttcctgaatgcctatggccctcctgttcagtccttgcctggtcacagtgaggagctacacagcaatgagaatgaagtactacttgtagttaacctttgacacgtgtgggtttttttaaatatatatatacatttccctttatgttagagtttgcaggaaaaatcaaactaatacagcccaaaagctgctgcctgccaagacaactagaagctggcttgatgagtttgtttgcagatgtcatctatggggactgaacagaccgacctagagtgagaatctataacacctccatcatgacaaagaaatggtgaagaagtcctcagaactgcaggaaggatttgttgagactgtgagcacattcctcttctccaaacctctcctggaatgtcctagaaggcccaggaattcccccaaagcactggttcttcctatggtcaaacgtcagcaacctccaccaaacatgatggaggaaagcgtgaatgttgtcactatgacggaagttcagctttagtcccagttaacaaatattggcaataaatcaaaacaggaaaaaccctacatatgcacgttgcttacttttttatatgacagttcacagacatctgaaatactgctcatatttctcaccactttgaatgatagttgattttataaattaatcctataattagacatctcatctattaccgcatcccaattgggtgattggctgggcaggtatttgtaagacatcctcccatataggctacaccgcccttaaaactcaaaatcctcctgtgtcagttccctgagtgctgagattacaggcctgtgccaccaaacctagctactgtcttccagttttattcaaatgtaaggtgataactgtatttcagcatagtctgctttcctcatcattcagacgtgtttgtgtgcatatgcaggtgtgccttcaaagacgtcctgtgatgggctgag

SEQ ID NO: 35572 - DNA, 1220 bp, Mus musculus
cttcctgccccttccctcaaaaccacccttgccccggccacactttcaaagcggtgttgtaatggtgccctctggtgtccctgtcacaaactgccacttaatgccaggaagatgaacttctctagggagcctagaaagacgggctcagatgaaaattcatccggagctgcatcctattgaaacaatggctctatctgagggaagctaaccctgaggcaaagtgtgagaaagtatttccacttggtagttatttttaattttgttgttgttgttgtttctggagtctctgtagacctggctgtcctggaacatgtctgaaacacagagactcgcctgcctctatcacctgtgggctgggatttaagggtgtgtaccaccgaggcccgatgagaaggtattttcttattaacctctgaaaacctaagctaccatggagtgtggctgcttaaaaagacgaacacagagtcaaacaccgcccacacaggaattatgatggtaaccctcgtgacccgtaaagacatccccccgtgggtgaaagttcctgaagacctgaaagatccagaagtattccaggtccagtcactggtgctgaaatatctgtttggcccacagggatctcgaatgtctcacatcgagcaggtgagccaggccatgtttgagctgaagaacctggaatctcccgaagaacttaccgaagtcttcatttacggctcccaaaacaacaaggttcgggctaaatggatgatgcttcagtccatggctgagaggtaccacccgcgcaagcaaaaaggagtgctgaagctggaggaagccatgaagaccctggagctaggccagtgtactgagtgaagccagtttccagtcattgtgtctcccacctgggcacaggttaagctgtggccagtgtttggttctggcgggatttttagctttgttacatcctagcaagatattcctggatccctgccgtgcattctgatgtgaatacataccaaggttaccattctaaataaaaaataaaattgaaatgaaaaaaaaatacgaacacaaacccataaaatggcttgaaggataggcgcttgccgtcagtcaagtttgatggcgcgagttcagttccagcggtccacaccatagaaggcaaacagtgactcctgctgcttgactctgatatgaacacctatgtgcccgaaaacccagagacaacaaatgcagcccagaca

SEQ ID NO: 35573 - DNA, 1189 bp, Mus musculus
atgcactaacctctccacattttagaaactggtggcattcaggtcaatgtttggagccaccggcttcgagagaggaagtatcgagtgatatatgaagagataagtgatcctgaagaggaagaagacgatgattactgaactggtaagtggtcctctgacacatctcacaacaccagaacacacaggtttcccatatggtattagaccctacccaatcatccacttctagtcctttggggcgcaagtctgaaccggaagcagtatgtcatgcttcctttactgcagcgctgggtagtttggagaccttccctagccaggaatgtatgggcttctaaatcccaggttatcactcaaattgtaggccatgacttcctctcgtgaggcaggcccatgctctagaagagggtgtgcttgtggggcagagctttgaagctggggggaaggagagcatgcaggctgtaaaggacaggctgaaacagggcattgagtaggtggtggcaactcactagcatttctcttccttctctttcttgtctcaaccacagacagtcgaaataaggccacattggaaggatggagtgtcgattcgacatcacagctacagctttgaaagactaaatatcagcactatagatataaacatttatttatatatttatttattatatacattgatacctatatttatttatttatgaagtctactaaaattctgaactaagcatgtgtcacatgtttgttctcttagcaattttgtaggatgtgccaaacactgttaggagtctttttccgtcgtgccaaacatttcctattatgattgtcactgtgttgagccccactagaactgctctttctgtgccaggcactctttaaacaaagatctttgtgtatggcaagcatctggtcagcactgtgggtagtacatgctaagaactctgttagtattgacttactgggtgacagccactctggcagaataccaatgtttcaagcaggctaaatggctcagtgttaaaggatcctgctgtcagacttgagttcaatcttaaggacctacatggtggacacagagaactgactccctcacagtgtcctttgctactcacaagtgaacgcatttgtgcgtgcacacacatacacacatatccatgcatacaagcacaaaataactcaaaaaacaattggaaat

SEQ ID NO: 35574 - DNA, 2076 bp, Mus musculus
aatgctttactactactgaatatagctttatacaagagtcaccatgatagctgggataggttcctagggattttacaactttgttccaattatagcttataggagagctatttaagtttgttttattggtatgttccattttcacctcactaagactttttgtacataaccaactgtagccactctggcatgcaatgtgcattttgtttcaagggcctacatttgggactttaggatccattggtacagttacttaggaaagccgtgtttcattccacatgttgaagaaagtagggatcaggatcgattgagacaactgttaaaacatcaaaaacgatggaagctcatacaaatatctaaatgtttaaaatatgaattgctcagaaggtaggcttcattctcctcataattcaggcttgtcctataattctgagaaatttctagtagaattttctaagattaatattttaagaaggaagaaaataaaactaatagtctccacctctatctttcccttccttgcgtgccaggcaagttttaaacaagccttttaacctcagttcatttgctgttgtttctagaaagctctgtagaaatctgtttcctgatgcaagtatacaggacattttatttttcacaatcttaagaaaaagaagtgttttcctcactaccatccttagttagaaatgttgatcttagaaactttttaagttatagaaagtaatgaaatgatcaagtttttgttcctcatgaaatccattttgacttaatagcagttcattttcatgagatactcagttttgtcctccacaccatttcatctaatggataatttctctctcatctggaagtatttattttaatttaaaagggttggatagaatattgtcagtactctgacaaaggtgccagcaagcaatgctatgatctctaccactaaatgtggatgatgaaatgtctacaaacaagtgaccatgaaattcacaccaacttaacttgaaaattgtaacaaaatgtaatgcatttccaaaggcacccctatttgtgattctatgggatagaatagatattcaattttctgatcacctaaatacataaaacacatttatctggccatcatactcctcataattgctttttaaaaactcttttggtatcaaattgatgagaaatttcataaacaaatgaacattcagtttggtaagtattttactatactagaggcttcgtaaaatagtaagtattctttgatgtgtcattcacgctgttaatctttgtaccattttgtatgcacacatttcagtaaggttctgaaccacagagcgtccgttttctttcctgaaatatttttcctcatttgtacttcttctgttttaccaggatttgtggtttacctgtatgagaatgcataggcagcccatcatttttgatcacttttaacatataaaagtcaaattgatgtttgtctgtttgctgttgacccctgtaccacttttcctgtttgtaatacatctagatctagttagtgtacatcatcaaagtgatactttatatgacagataaatctttgtacttttcttgctcagaggtacaaaactgttgaacatacatagcaagtacagggaaagtacagggaaaacaagcttaaaatgctaaagcactcctgtttgggttattaagaaatccaaaatgattgaaagggtaggaagaacatccctaggtcaacccaaaatgctcttctctgtcaaatcatttccttatgtttacaggcaccaggtgttttcagtctttaatgtgaagaaaatcctttccttgaagctttccagtgactgaggggagagatggtacccatttccaatttcaggtcatgccttgagagtgagattagcgccactctgacacttcctaggcaggttcggaattagacaagggtaaggatacttgtatttttccagccttggtttagaagcatgacccagaaatacttttaaactcttaattttcaaatatattgtaagcccttttaccttagtcagttggtaagcatcttgaatgacctcaaaccaaactaactag

SEQ ID NO: 35575 - DNA, 1198 bp, Mus musculus
ttagtgagtgcacaggtctttgggctccactgcagttgccctgtcttaccatcagttaattacagaaattagcactcagggcatgtgcgatggctcagccagggaaggttcgtgccaccaaacccaacaacccaacttccatccttggggcctacatggtggaaggaaagaaagagttcccacggctgtctgatttctaaaagcaaactatggtgtgtgtatgcatgtacacagactcacacaacacacacacacacacacacacacacacacacacacacacacacttaaaaaacaaaaacattttaaaaatcccctaagagcttagactttgtgagaaaaaaagacccagtgggtctcagaatatgcttctgatagcaaataagtttattgtcttcatattatcctttataaagaatgtaacagcttcttttgatagttatacattacaacttaaatggctgatttgaagcattaattaaatgtgaatgtaatctgtacagttttgtaaacggaaaaataagcttagtattgattgtcttgaaaatgcagcatttccttgggatctgttttacagcattggcatggttgcatgtgccagtgcgtctcagccagtggattgtgggtatgcacttttgtggactgcttctcagcgtcattgactcaaatgttgtttatgtttcttcatacaataaattaattttttcaattttctcttgcattttatttcttgtataatcctcaaatgacttctttttaaaaaaatttaaggcccatttgaaagacaaatttgaaaatggtttgttgtgattatgaacttttataatgtaaactggaaatccctgaaataggatgagaagttcaagaatgcaaagattcaggctttcaatacaacagctgcccatgaaaacactgctgccttgtaagaattggctctatagattggagccaggctgctgaatactaccactgagactctgattagttatctcacgtgttgtgtatgacacaaagacagatgtgactatataataataataatggttattactactatatatattctacataacaaatataaaatacaaggatgacagactttggttgagtgtgaacataaacatactacaaaatgaattccttctgagactagaaaaatatcactcattgaaaggggccagtggggactgtgggctag

SEQ ID NO: 35576 - DNA, 1875 bp, Mus musculus
tgctaatgagggccggacagtcaaagacgggcacccagatctcggaagcataccaatctaagacagaggtacatgccaaaaggacatggctgttgataacacaccacagagacatgttttgtgtgaaatataacacaaataagctgcacatagcctccaagacagaattggatggttcaggaagatctaagatttcctaagacaggtgcagctgccatccaccataactcccaggcaggaagagcataaataaattttatgcctcagtccagcttttttttttaaatattaataacagggggtaaattgtaacctcccccagcctaaagcaggctaagccagaccttgaccttgctgccactaaggagattacctagggtggagccttcctccctagatcactctattgttcagtcactgccgctgttccccttcaagatactgttacctgctgggaggccactgagctactctggagaatacaccctatcctgcaagtcgtcacttctgcagctggatgaattggcgggaatgggcctccccacccccactcccactttacaagcgcatttgccattaaacatttgagctttgatcaggaaacttgatttagctccatttttctctcgaccgcctagttctctctctttcagctccagtctgcctcccaggtgtatcctgtttcttgtgagctgcaggtcagcttccaacaatgcataagacatccttgtcgggtctagaagatgctatatagcatcagtcatcccagtcttattccttacaatctttgtgccccatcttctttcatgttcctcaagctttaggtgtaggggttgcgtggtaggtatacaaggttaggacatgtcacttttgataattgggttttgtcaatttgatagaaactagagtcatctgagaaaaaggaaccccacttgagggactgccactaacagcctggcctgtggaaatggctctgtgacagtttttgattaatggttgatgaatgagggcccagatcactctgggtgatgacacttggtgggtggtcctgagtaaacagtggaggaacaagccagtaagtagcactcctcaatggcctctgtttcagttcctgtctccaggttcctgccttaaacttcagcactaacttcctccagtgatagatatgatctgtgagttgtgaaatgaaataaatctatgttgcttttggtcatagtgtttatcacagcaacagaaagcaaacaagaacagcacatggtcacttgttctctgagctttgactagttgtggatctctggagtagctgctgtagcaaaaatgaagcttctttggaaagggaagagagctacacttatctgggtataaggataagtgattggaatagagttagaaatgtattgggttgtcctctagagcccgtgattgccccagtcacaattggttggttaagttcatggtaccagacacaaattccttcctaataaaggtttctttagtgtaattagacagatttcagttacccagagataaaagtgccacagttgtaccattcagaatattttgcctggccagtcattgctgtggtctgtaacctttacatctgggtaggacttctgatcacattttaacctcagtagtttcatagcatcttctgattctgtaagacctaggcattagagaggaggcttccaagtcagctctagctcaattcctccacaacatggtataattctagttctgatttttagcacatgataggagagacagactgtggccacaccaggcatacatcactgacaaagaggaagagaaaatgattttatttttgttcctccgaagtaaaaagtctaccacaggatgcaaaaacactgattg

SEQ ID NO: 35577 - DNA, 1115 bp, Mus musculus
gcatcatacactgcagcacaaatggactaggcttacagtccttagactgacgtgcggcaaacagtgaggctaggatggagtgggccttacagtccttagactgacctgcagcacacaagcagctagaatgtactgagccttcaatacttagacttacctgcagcacactctgcagcaaatatggactgggccttacagtcattagactgacctccagcacactctgcagctaggaaagactgtgccttactgtccttagactgtcctgcagcacacactggagctgggatgactgagacttacagtccttagcatgacctacaccacacactgcagctcagatggactgggcctgatagtacttagtcttacctgctggacacactgcttctaagatagtctaggcttacagtacttagactgacatgcagtgcacactgcagctcagattgatttggcttagagccattaaacttaatactagcatgctctgcagctaggatgcactgggccttacattccttagtctgatctgcagcaaactctgcagctagggttgtcggggtcatagagtacatatgctgacctgcagaacacactgcagctcagctgaactgctacttacagtcctgagacttacctagagagcactctgcagctcagatggactgggacttataaaccttagactgacctgcatcacatactgcagcgcagatgaactggacttacagtccttagacttactgcagcaaatactgcagctcagaaggattgtgcctaatagtacttagactgtcctccaggacacactgcagctcagatggactgggcattacagtccttagagtgtcctgctgcacactcttcagatagagtggacggtgctttccagaccttagactgaccagcagcacacactgcagctcagaaggactggtcttacagtccttagactgacatgcagcaaacactgaggctaggacggagttggccttacaaaccttagactgtcctattagagctgcacacatggcagctctaatactgggaattacagtacttataattacctatagaacactctgcatctcagatggacagggctttaaagt

SEQ ID NO: 35578 - DNA, 2370 bp, Mus musculus
caatgagttgtagaaaatactactaaaagctgcaagtgtatgtgcatgtgtatgtgtgtgtgtgtgtgtgtgtgtgtgtgtgtgtgtgttgcttagtgtttggtaattgtgaggttttgctagtatatcaaagtcctcttcttgtatgccttcaggaacctgtaccatcagatgggagaaccgtaccatgaactgcatcgtgaatgtttttgcagttgcgattgtcctgtagcctgtaatgcactaaaaaatgtgttgggttaaggccattaacttaagtttgtgagtgtatcctttctaaaaagagttacaactacttattaatgtgctagatgacaagtgtgcaatatgcttcaaagctatcaacagagaactgaatattgtaagcagaagtctaataggaagttggcagaattatctcgtattctatacagcatcatttaaggatataaaatgttagttaacaattaatgcagaaatatggctgacctaaacttagaatcttctacttatacaagcctttcactggcattatgttcccccagagatggggaaatctatttagatactaacattatcattaactagaaaacacaacagggagaaatatatgaacaaaaactacaaggagaaatgcagagaaaatgacatgaagtacctaatacctttctggtttaagttttattcctttgttgaattgcatatagtagttcatagagagtaatttgacacacatacacccgccccatctaactagttttcttttcctgagaactggcaaatccattgattttttttttgtttgttttaatgccagtttcttacatttacacttgaggtggaattaaatatgatcgaccagatttcctgggtgaacaaaattagtaaagtatatgatcaacagtatatgactcagacaactgccttacaatccattgcttccatgagagatgggcaggtacctatcggatgtgtgctctgcatgtttctctccaggcagacagctcttaacgtggtgttcacgtggcattcacatggcgttcacctggcaggttggttttggcagttattcagttggaaaaaccagtgtttatgtttgagggagaataaaagaaagaaaggaaaagagtctggtcctccgtggaaaattaaccagaaggagagcgctaattggtgacagaattatagatacagtttttaagggttgcttcccagaaagtaatacatcaaatatgcaactcttactgaaaggccttattagtagtcttagctatacaatgataaattttattgaattagtttcaactgtgtgtgactaatttaaaaatacttatgtagagttaggacaaatggggtagaatatacattaaaagtgaacaatcattagcaggttatctaatatctcagggcttatgaaatatagttcaatttatttaaaaaaatcaaaaataaatattcggatacacagctggccaccaaatgcaaagtcagtctgccatttaaccttcaaaatgaactcgatttcacatcttaccattgccacgcaatccatgtaaacactggaatcacgtgccattgaagttttaggggaaggaaacgtttagtagtaatggcaacaacattaagacaggatcctcatatgaggaccatgtgcatggttgacattttgcagaataactctaatgacaagaatgcaaagatggggtttaatgaggtgacctgtagctttggcacgtccagagttctttgtcattacctttatgttactttatgctgctggctcttgtaccttgggagattgtaacagtgaccaaattatctgtgcatttaaggcttactctttgattgttgttgttgaaggctcattttcaaagtatcaaatcatacctcgtgagcttgctatctgctgtttctagttaaaaatataataaagactatcttattgtgctgaacatctggctctggttgatccttcagtggtcaagaaatcaggatctgctttacttgaataaattccaagcaggataattggaggaggaaaataaatgggatcacataaatatattacaaaaattaatatatcaagagtgtgagaccagactcagttgcccaacaaaactgtgtctcaaaaatattattacccaaatgtattcttcaccatgacagaatcattaatagcttctcttttatatattttatttatggtcttgaacacaacatttttctttaaagtaagcataaaatatatttggtaactgctttttaactcgtaataattatttttagcaaattgtcttgtttgtcaaattgcaaaggagttgttgcttatttcaaaaaattagggaccgcaagtaaatacgagtattcatg

SEQ ID NO: 35579 - DNA, 1160 bp, Mus musculus
gtacaggggaacgccagggccaaaaagggggagtgggtgggtaggggattgggggtgggtgggtatgggggacttttggtatagcattggaaatgtaaatgagctaaatacctaataaaaaatggaaaaaaaaagatatctgtctttatttgccttccttattttatttaacattatgtcttccagatttattcatgttgccataagtaacagaattttctggttttatggctgaatattactattccgtgtgtgtgtgtgtgtgtgtgtgtgtgtgtgatagttggtttttaaatctacttttctattaatcgacacttagctttttcctatgtcttagccattacaaattaacgctgcaatgaatatatgatttaagctggaaatttttatctaatttacaaatgaaattttaggactattggtgctttcctatattttacaaattatctgttattttatagttagatataataataagcaaaataattttaaaaccgtatattaagaatggggaatggtagctcacacctataatgcagcaactgggagtctgaagcagtaggattgccatgagtttgaggcaagtctgggcatatagtgagttattgtcatcagcctgagctacagtgtgagagtctgactaaatccaagaccagtaagaacaacaaaactgtaactgaaatttaaaaaagaaagactaaagcatttaagctatccaaagcttatatatgtggtatagctactcagatctccccctctctcattcactcactctgtgtgtgtgtgtgtgtgtgtgtgtgtgtgtgtgtgtgtgtgtgtgtgatccctcacaggtgtatcctagtgcaattccccatgtcataaggaaaaccatcatcaggctgtggatagacatagaaagctggcgttgactgcatttcagcaccccatttggcaaggaataatgaatttgggaatgtatgtggctagtctctgttccttgccattcagaaattgctgactcatagaggccagtacaagtagtttttgttgttgttttgttttgtttgtttgtttgtttttcgagacagggtttctctgtatagccctggctgtcctggaactcactttgtagacaggctggcctcaaactcagaaatctgcctgcctctgcctcc

SEQ ID NO: 35580 - DNA, 1293 bp, Mus musculus
agtacatactatccctgccctgctcccacccccagctccctgcagcccctccccctacgtgcaactgacactcctacccagtcaaagctctgcctttcagcccacgtcatacgtagtgtccatcttgtgaagccctgttgtgccccacagtgtagccaggccccctgcagctagtcatagtgaagcccaccctaaggccctgtgagcgccagctccctcacatgtacttggtccaactgtaggtgactggttatcacatcttcactggcccctgtggccctgcatgtagtaggggaggcttcagtcagcccctcactgtggtccaagaatgccacacacctttccgtagatatgccgatggtaattatcttttcttttggcttaatccgatttggtttggtttttccctttccctggattctttcctaccttcttcaggctgtcaagcacgggagaggagacacagtgggagggattcataaggagaaaacagcgtctggcaggcatggcagaaagtgctgttaagcattagctggcttccttgttcattgttccaagagatgggtgtggagagacggcttagtgtaggatcctctcgaatgaagcctgtgtaatcctgttacaggttgtgttgttacttccctgatttgccccaactacttactattatttcgctttcgttttcctgtatttttttcttgcattgacattattgacgttgaggacctcatcagatcaatttaaaagtgagtgtggaagggaaacgaaagtcaacatatttttaaaagatcttaaaaataatgcctctgtctagcatgccaacaagaatgcattgatattgtgaacatttgtgatacatgtattaataaatagagcaattaaaaatggctatgttgtggttttcttctttgattgcgatgacaatctctgaattagaacgttcccattctatcctgctccccagggcttggcagacagccccatcttctatatggacacagttgtctccatgtattcccacctaagtgaaacgctgggcaattgttttctttttttaattatttggttatttcagaaacttgaatcacttatcatgaacaagatagaccgttgactgcagagttagagccttggtagtattctgtacctctgaaattcatgaaagaaatacaaaggtatcagcagagttttttaagtcctgatttaattttaaaacgagatgagtatcttatttctttcatcatttctatggctatatagtcttccctctttccttttttctttggttcaggt

SEQ ID NO: 35581 - DNA, 1191 bp, Mus musculus
acatacatacatacatacatacatacatacatacatacatacataagaaagcattggaagcatgggttatgatctagaaccagtaaaccagagggagatggagatttgccagtctgggttctagagttaccaatgacttttctgtctgttatcagctcttgttcccttcaaaattgaaaagagacatgattttcggtagacagtaccagtccttcaagaaaaaacaaacaaacaaacaaacccacatgcataagtgtctctccttgtttggggcgcttttttgtcttgcaggggaatgccatactaaaacttccccccgaagactttagtgggaagaaatttaaaattagaagcctgagtcatcttatctggaggaatggaagagctgactggaggttgagggatgtggcaaaggaaatgagatgggaaatgagtatgggctcagggctgggaacctgaaagaggagtttcaagtgtaaaacttgaaaggtagatccagggctatggtacacagcttaggcttattaagtaacccttgcttaagaactatcttttgaaaggagcacttgacacacactccagaaagttattgggtatactcccattttttttctttaaatgataagatatacccaacaccagtcctaacttctgccaccttctcctagtctttttgatagccaaaagggccacaaggcccaagttcacactccattgccatgctcttatctcttggtgggggacacaaaactatagatcagatgaccagggtgctcttcatacctggcagcagtagtaggaaagaccccgccaggagggaagcaaatgcctcagtgttcccatccccctgcagctgaccacgacctgggccgtggagggagcaccccatgtccacgtgcatccggcatgtcctgctaactcttcttacataagattcccaagtatggagtcagggcagctgtgaatccctcttacccgacgtctaataataaatcgaggctaaatttccggactgcagtcactctaggttcaggattgaggggctcttttgcaacccggacacacaagcattccggtcatcccacccggagagtgcgcgccaagcccgcccagcccgcgcgcgccagtccgccctctggtttggacggcggctccttgggctcagtgcctcgccctccctcccccaaacag

SEQ ID NO: 35582 - DNA, 1312 bp, Mus musculus
tggtggaattcaccaatgagctccagacactgctgggctcctctgtggagtggctccaccctagtgacacgggccatgaaaactactggtgagccacctgccccgcccacccactgtgtacagtgtgttatagtgttaatccttgtgcatatgtgtcataatacaacaatttctgtaaagaaaggacactattacatatgaaaatatctcttctttatataagagaagttactccggtcagaagaacccagaagcccgtgttttctttctaaaattttaagtcagtttttatgaagctgttgaaatgtctttatttttcagtgtacacatgctttgaaatgtatgttcgtttttacttggaacatttttcttttctgttcttttctaaggagaaaaaaataaatgaataaatgaataaatgaaaaggagctctgtgcttggcgtaatttcatacaaagctctggtggcgggccatgggtgtattgtgtggtgaggactatgtgtttggtttgctggagtgaattgggtgaaggcacttggtggtggtatacttttatgttttgtttacagagtacctgctcacaccaggtaaatgctattggacgtgatccagtggtatgtaatataaattcaaaccatatccacacacaacaactaattgtaagaaacttttgtatcctaatttaaaagctgtgaaattacttttcacacatcaaaccggattgtttatatgtttaaacattttatgctcttatttaaagaagactttgagctatttttttctgtactctgtaaaatattgaaaactaacataatatgttgaggttgcttgaaaatgtacataaaactaaaattttctgaattgtgtgtttatgtttgaaatctgtgttttaactttgtaagtaaattctctgcctttgtatttatattttacaaaaatttttcttaaaaggcaataaacctgttgaggaaaggagcaaattgaagtactttgcatcctttgtattccggaagtagttagccattgtcacgggctttcctgtacatgaggatgatggagtccctgtgggcaacttgtaaacaagttcgtctccacaaatcaaagtagactaaggcctttagggaagctattctgagaatatgattcatcatctcattctgggagtgtgattcttagatctctctctctctctctctctctctctcatccctttttgaggttttggggatcaaaaccagaccctcacacatgctaaacaactatactaccattgaacccatccctacgtttattttagaaagtgttctcact

SEQ ID NO: 35583 - DNA, 1221 bp, Mus musculus
gtccactgctcagacaaaagcctcccatggaagatgggcgtcaaccctgggaacccagtagattcccacagttacccccacatccaaaacagtaaacagccccgggtgacctctgccaaggcagtcaatagtggcctgccaggggacacagctctcctgttgcctccttcacctcggccctcagcccgggtccaccttccaactcagcccgctgcagagacctactccgagttccacaagcactatcccaggatctccacctctccctcagtcaccctgacgaagccatacatgacagccaatagcgagttctctacatccaggctgtccaatggcaagtaccccaaggctctagatgggggcgactgtgctcaatccatgcctgggcacacccggaagacaacggttcaagacagaaaagatgggggctcaccacctctgttggaaaagcagaccgttaccaaagatgtcacagacaaaccacttgacctgtcttctaaagtggtggatgcggacgcttccaaaggtgaccacatgaaaaagatggctcccacagtcctggttcacagtcgggctgcaagtggcttagtgctctctggaagtgagattccgaaagaaacactatctcctccaggaaatggatgttctatctatagatcagagatcatcagcactgctccctcatcctgggtggtgccagggccaagtcctaatgaagagaacaatggcaaaagtctgtcactgaaaaacaaggctttggactgggcaataccgcaacagcggagttcctcgtgtccccgcatgggtggcacagatgccgtggtcactaatgtttcagggtccgtgtccagctcaggacgcccagcctctgcatcaccagcccccaacgccaacgccaatgcagatggcaccaagaccagcaggagctcggtggataccacgccatcagtcatccagcatgtgggccagccctcatccacgcctgccaagcacggtggcagcaccagcagcaagggagccaaagccaacccagaaccgagcttcaaagcgagtgagaatggcctcccgccaacctcaatatttctatctccaaatgaagcattcaggtccccagcaattccctaccctaggagttacctcccttacgcagcaccagaaggcatcgctctaagtcccctctctttacatggcaaaggacctgtgtatcctcacccagttttg

SEQ ID NO: 35584 - DNA, 1181 bp, Mus musculus
ccttcaagtatctaggtgaaagtcacgaaggggctgaggctgtagctccgtgtgttcagtgctctgcaagtaagaaagcccacgttctaatcctcagaagccacagaaacaggagtatctgactgtgatccctgtgcccctgtggcaagatgaaggacagagataggagaatccacagactcaagggccacacctggcagacagagtggcaaaagatgagaccctgtttccaaacaaggtggaagggtagactgacatctgaggttgtcctctgacctttacacacacatcatggcaatgtgtgtggccacacacacacacacacacacacacagggctggctaatcttatgtcatcttgacacaaactagagtcaattaaaagggggggggggggaacctcccttgaggaaatgcctccatgagatccagctgtaaggcattttctcaattagtgataatgaggaagggcccagggatgtaccatccctgggctggtggtcctggcttctagaagaaagcaagcgggtagtggtggcgcacgccggtaggatttgctgaaggaggcagaggcaggaggatcacgagtttgaggccagcctgggctgcacatttaagctgggcacggtggtgcactcctttaatcccagcactccggaggcagaggcaggcagatttctgagttcgaggccagcctggtctacaaagtgagttccaggacagccagggatacacagagaaacactgtctccaaaaaaaacaaaaacaaaaacaaaaaaaaaaacaaaaagaaagcaagctgagcaagccatggggaacaagctatacagcaatacagcagcacccttccatggcctccatcagctcctgcctcaaggttcttacctgggttgagttcctgtccgcccttcctttgtgatggaccacagagtggaagtgtaagccatataaacccttttctacccaacttgcctttggatcacagcagtagaagcaataagacacatgtacactattactttaaaaaacaaaacaaacaaaaaaaaaaaacgaagatctgaactgagttcacagctctgggaaagggggaggggcaagaggatgaaggccagagagacactgagatatgaacttgaccagactagatgactagtttacagtagagggaaggacatggggaca

SEQ ID NO: 35585 - DNA, 1156 bp, Mus musculus
gagcaaaacctgagctagcccagcgctttccatctgtcagtcgcagcgggcgggaggtgcaagaccgggaaagaccgaagcctgggttgaaaatcgtcaccggaggttggacaaagagtccacacccgggagtaagcctcactgtgggctttcgagaacctgcaaccagtggggccacctgctctaaccgcgggccctacccttcatctcgtgaccggtcgttgtgggccggcgggacagaaccgccctgttcttaaaactcttgactcctattggcagagcatgccattcatcacgttcgcctccgccccaattgctgacgtcgaccaggctacgtctcgctcgtgtagcggcgtagttggcgattggctgagaccttgtcttggagcggctaaaggggaggggcttggggatcggaaccgtcgggagcgcgtcactcggtcgagctgcagtgctcgcttgagtcccggcgtcccttttcgtgtggctcatctccgcttcagcaaccgtggcaccatggctgtgctggtcgttctcctgttctttctggtggcgggtgagtagctgggaagcactgcgggaagctagggggcgcggggaccctgggagggagcggctgctggcgggggccgcagtgggggcggtctgggcttggcggccctcttcggggttctggaccttgatctggctcgggcggagcggccttgtggtctctggagacgagcagggccacctggggggactccggagctgacatcagcctttgggggtaaaggcgcgtagccgcttaggacccagtcctcccatttgtctgatcactccttccctgttcaaggccctttggaggatgggtttgcatttcttaatacaccgttgaaccacaacccactaccaaggaaaggttagctaacaatttagctgccgctttttagctgctgtcttttttccaccttcatttctaatggttgttattgacaacgggtgaacccttacctccctcatatatacatatcaggatgtgaagttgagtcatcgttttttaaataatgattatttcttaagatgatcgcaatttcttagtattgatttcagttcccaatttgaaggatttggagagcagggtatgagtcatgcttttaggatcacatgtcaaata

SEQ ID NO: 35586 - DNA, 1634 bp, Mus musculus
ttaatcagaacgatgttttaatcttaaagttctttcctatttatatttttttcctttcctcatttgtagaacacccaaagtccctataaccttgcatataagtataatttggagtattcagtggttttcaacttggtactgtggattatgatcggcttggccttggctgtgataatcacctcttacaacatttggaatatggatcctggatatgatagcatcatctataggatgacaaatcagaagattcgaatagattgaattttccttatgctagacttagacaacaggtttggtaattggctgttttgttaaagtatatcttttagtgttgtttaaagtagacggtataccttaagtttattaaaaagaaaacatagatttcattatctattttgtgtgtgcctattgtttctttagagtgatttatagtgttgacaagttgaattgtgatatagattcaatgtgctcaaatattgttgacatagccatttaataatgtaatttcattccatttaatacatgtggaaatacgcactgagagaactgtaaaccacttagtcatgttactcgcgctggagaacgcactgggtttcttagagaaccttaaaatgcttgacttcttgcacaggctacgtagtgcagctgttagtcactatgaactatttgtaaatgtcttgatctgctgtaaatatctctgagacaggaggaaatatgttaactaagagcagcccaaaaatactggatatgcttatccaatcgcttagttctggacgtgtatatgactagcaagctagctgtttttaatctcttctgcaagtttggtgatccgtgtggtttagtagagatattaaaattattaaaaatactatgttgatttcagaagagactagctttgtggaatatagatgcttgtaattaggtacataaaaacaaatctgtgggggatatcttgaagcatgaatataaaatatttttatttctgtactttccccctgtgaagttactcttggtttgtgtgtggtatggcttcaatctgtagactattatatggaagtggatgattgctactgttcatgtgcaaatggaccaatatctatatagaatgacaaataaagataatgattcaaaatctgtgtcactgcaattctgaatttatattataaaaacctaattaaacagggtgttatttcaccaggactggctggtttattatacaaagggtgaattcacattgttttctacatttgcttattctcattgcctcctaagactttgtaccaatgtaaggaaagtattttaattgctattcctgttactgaacttgtgcataataaatttacacttgactgtgtaggaaaggtttaaattttcctgtagccttttaaaagatgaacaaacacttggttagaaaataaagggctttctaaggtgaggaattatggttacagttttatttcttaaaacacatgtatttgaaattttaatttcctgcctgtattacgtggcaccccacccccaccagaactggcccttagttggcttgtagctgagtccacctctttagaaatgctcatttctagacaacattgagcatggcagctttgaaagggagtggtagtttgtttttgaca

SEQ ID NO: 35587 - DNA, 1365 bp, Mus musculus
aactgtgcctgggtatgtccgaatggatgttcacaagttgaggacctactaaataagttgtagaacatctgtactatgccacctgtcttagtaagggttctattcctgcacaaacatcgtgaccaagaagcaagttggggaggaaagggtttattcagcttacacttccatactgctgttcatcaccaaaggaagtcaggactgaactcacacaggtcaggaagcaggagctgatgcagaggccattgagagatcttccttactggcttgctttccactggcttgctcagcctgctctcttatagaacccaagactaccagcccagagatggcaccacccacaatggaccctccacccttgaccactaattgagaaaatgccttacagctggatctcgtggaggcatttccccaactgaagctcccttctcagtgataactgcagctgtgtcaactgacacacaaatccagccagtccaccacataactattctaaagaatgaccccataatgaagtgcagtcatgggaattacctgtaaggcatctaaaggaaagaaacggtttgaagggtggactggagctccgtggtggggcgcttgcctacccagcatgtgtaataccttgactagatggctgttccactgccaaaagcaaatcaatagaaaaacaaagtattgaataatgatgagcatgctatagtgctgtttgtgtgctatagtaactgagctctggaaagggatggtctgctttctaagcctttcttctatattatgtctctaagaggaattggggctgtgggagcagtcagaggaatttagcttttctgctttgtatattcttttttataataaacatgcatctgtgtattttgaaaaattcttacagtttttaatttcaaaacaaggcgcatgaataacacaccaaattgtaagccatgcgagtcagattatatggagtttgctgtggcctcttattttgtagctccacccccaggggtgcttttgaatcctagcaccagggaaagaaacccaggaaagacaagccttctaccaaggctgccctcatcgcctgtagggtgccttgtctccatccagtacgctttacactcagcctctccccgggacactggtgcttgatagtttgaaagaatttgtagaaaaaaaatggctaaatcatagttgcaaagatcaggaaattatcagagattgcctcctttccctttactaggttaattagaaatttacctgctctgcaaagcattcactcaacagtggcctgtattaaaacacattcaaattataaaatacactttgcaagacaggcctaaatagtaatttcaactcatgtgattctcagtggagtga

SEQ ID NO: 35588 - DNA, 1101 bp, Mus musculus
atcccagggtgctgcgcgtgcttaccgccggccccgccttcaggagtaagacatggtggtgtcggagctggcagcccgcctcaattgcgccgagtacaaaaactgggtgaaagcaggacactgcctgctgctgctgcgcagctgcctgcaaggtttcatagaccgtgaagtgctctcctttcaccgtggactgctggctgcagtccctggccttggaccccatgctacctgccgcggcggttcccggtgcagcccgcgcgctcgccaggtgagctgctgaccccgaactcgggcgcgtctccacagcttgtccccctattccgtatgcttgcagtctttttccttcccggggcgggactgcttcctacttccggggtgttcctgttttgctgccccgcccaccccagtccctcctcacctctgccctctgtagtttcagcctcagtgtcaggtatgcgcagagtggaaacacgagatcttgaggcatcacatcaacagaaatggagacgtgcactggggaaattgcaagccaggcctctggcccaaagacccttgggaggtagccaaggtaagtacttgtagcctggaggaaagcatatgaagttgctcctggtgccccagggtggagggtgggttttgagtgcaagctgggacttcagaaagtacagaaatactagaagataggttggttctctggggtctagtggcgtagtggtgaggggatactagagtggacccatctaagctcagtaaaataaacgcctctgtttcttcgcttcctgcaggcacttgagttttattgtaagacgctgtcttaaaataaggggaaaaacaatacaggctgagagacatggaagaacagttaaggtttactttacagcagactttaaaaaaaggcttacttttgctgtggcgtgcgtgccaagaggatgcttagctaaggtatacatttttagaaggtagaaatattagttatgaggtaggggttgttaggcctgtgtttagattttgtcactgtgacttaatgcctagtctgattgggaatttgcttggatttcttgatgttgcctggaagctgtgtagtgagtggagggaggtgtc

SEQ ID NO: 35589 - DNA, 1648 bp, Mus musculus
ttttcttatgttttgggtgtaatggtcctttttgatttttatttttattttttaaggcaggtctgtcagttttgaatactgtaaaactgtgacaaactttatattgaagctgtattttaatatgcccgctttgaatccttactccgaaatggttttgggagctgttaaacacatcccaaagaagcaatatttaataaaactaggatctaaaagagacacttgtgtatgtataagctctctagagttcttagggcctcccttcatctttaatctggtggggccagtcagttttttaattatgtatgtctgaaatttgaccaaaaacattcttgttttaaggttagtttcttcagacattcctaacctgactggtgatagtctttagcacctcagttgtttttcagtataggattttgctaaaatgaaagagctttgtctttaaaaaagagatcaaggatcccaaagaatacgattctcatatgtgagaaaatgggaacctttttgctaggaaaatgtcatttttaaggtatacttaaaaatgtatacagcattaactaggaacaaaaacgtgactgctctaatttgcatgacgtttttcttttatcttatttaactttttaccttccccagcccatttggggttgttctaaacaatctcaatttaatctgtcgtcagcaagacaataggacgttttgctggtcacaacctagtccagtcatttaaaaagtccacagtgcagtgcctgtccagtgttcagtggagtttctggcactggtacatctcaataggatttctttttaagagtactgtactgtctcttgaagccagtcagggactttttaaactttaatgaatatggtgtgattcaaatgtcttctgataacttgatgttatttggaggagtttttgttttgttttgttttgtgtgtttttttaaatgataatatcatgctgagttatctagacaatgtattatccttgatgaaattttagatgtttgtctgattacattttaagatgattgagcttctacaagtataaccatgaaattctagttttttaagtatcttactgcaactgtatcatgtgttctcctcaacttggcttgagtctcccttgcagtcagagttgaggccttctttgtcttctttgtctcttttctgctttcatctcctgcttttcacccaactctgccactgttccagagtaggtgactaaactttgattcttcctttagcttaacctttttctccttctgtttccagttctcttcacagtactaatcacatgggttcggcaatctaagatgtcttgatcaggagtcaatccttttctatttggagctgaatcctagctttcatgtagaaatctacatgtatatacaagaaatgtatttttatctgcaggatgatattgtttcaaataattttattaatagaattaacttttcaggtattttctcttttaagtgtggttttaaaatgttaaatgaatttttatacatgatgcattcaatggctacttttttcctaattataacacctttgaatgcattgtgtaaatcaagtaagataggattcaatgaacagaatttgattttgatgcttattaagagtaaaccaatgaatttgaattttgatatcatgc

SEQ ID NO: 35590 - DNA, 1134 bp, Mus musculus
agctggcacaagtgagtgttgtcagcactgtttttccaaagcaaacgccaatgtctgactccgccttcacatttcaaagtcacagtgtatttctctaaggagaatttccaaaccttaaccttttttcctttacaaatcagtctgcgatattaattagcaatgtcatgaaaaatgtattaagaaaccaagtctctgcacctctgtcaatgtctgctaacttatgtcttcaatattgaaccataaaagataccttaagttaaccaccaaaggcatagaagttaatataaggccataatactgatgaaagactggacagttgattgtaaataggattttctagactcggtaggtggaaagaattatttttctttgaaggaaataactttttatcatggtaattttgaaggatgattcctatgacatgttcatgggggaatgtggcttttacaaatcttgtattggttataattgttcatatcttcttttctgtgttgacttcattattcccatggtattggccttttaaactatgtgcctctgagtctttgaatttataaatttgttatcttaataaatattgtaaaaatgtaaaaaaaaaaaagattttaaaagtgtatgcattccataactttcagtgcttaaagcaacaaatgctatgttagctcacaatgtttgctctgataactctcctgagctagttgacttgtccatagcctcagctggcatggattctcttgtttacccagtggatagagcacatgacagaggacatgggagtcttgtaagtattccagcatcccttgcaaaagcaggtcacaggaccaagcagagtttaggttgagaagcagaacccagttccttgaaggagtccctacaggatcatattgaacctgaatacaatcagaagattcactgtagctgattctgctatctgagaactgacatatgatccttcataacaaggactagttacaagagttacaattacctggcaactgtctgatgaaggcaaagcaggcagcaatggcatggtgtgtatgcattcataattgaagttacctgttttccttcccaaaaggttcccagacaatgccaaccaacatgcctccacctcgaaaactacctcagcgctcc

SEQ ID NO: 35591 - DNA, 1224 bp, Mus musculus
gatcctcatgaaagatgtttggagagtcaaatagttctaaaggctgcttctgaaaacttgctcccttaccctactcctggtgtgttcctgctcctcagagaaaactgttgtcacttgtcagcacttgtcaggtagctgctactctttgtgtttatatagctgtatctctgagtaccaaggtacgctgtcacttgttgagtaattctcaccctcaaaagggagtgcttacaactttgaaaacttggtttcacttactctttcttccttcaggctgctcctagtatataagtaaatacattggcctttctcctggttttacaataaggttatgtagcaattgtgatttcgtaggggtttgtttgtttgtttgtctgtttgtttagtattcttgttgttctgaagatacttgtccttttgggcctccacatggaactgcactcatgcaaaaatgtgttctcacaggtctacatgcaaacaaacaaaaaaccctagtcaaaactcggttgggattagtgtggctcctgggaacacatgagagcaggagcttgaggtgtgttgctctgttgtgctcacagtcaggaagcagagcaggttgcttcctcctttatttagttcagtctcccaggctccgtaaaatctgttactcacattcaggatgtgtgatcttaattctctggaaccaccctcagaagcccattcagaagtttgtcttctgtgtgactctacattcctcatgctaacagtcaggttaaccattacacatcccatttctttctcttacattgctgatttttgtagtatgcctgctatagtagctgcctggaagaaggtacataggagattggttgaagtccatggaggttattggagaccttgtatgtttgacagtgtttttagtttaccttcatttaactgagagtgcctaggtatagaattctagactacgatcattttttgtagaatgtttgaagctctgctgctttgttttctacattggattgtgactggcctgaaccaagtgcctgtaagccttaataatctccttgggaggttgttttgtcttttttcctcacagtactaggtttcaaatgtaccttgatactccttacatcagtgctggggttcaagcaccttatcccctgagccatctgcccagcccagaagcatgttctcatatggatagatcactttctcttccctttcatctttcaatcttaactccat

SEQ ID NO: 35592 - DNA, 1237 bp, Mus musculus
aactttgacagtgcatttggaactgcaaataaatgcgtagtagagtagggatttaatgtttacaaagcctggaagtgcttttaaaaactcagtcatctttctccttcattccatgaattcttaatttggctttttgttatgctgatctatttattttctttgctgtctgatagaatttctttacccttgtcttccatccctggtattgttttctgcttggtttagtctattgttttatttacttatgtaggaatgtttcttgttcatgtttatcatgtgtgtgcctgatacttgaggtgtcagatgaaggcatttgatcctgtagaactggagttaaagactgttgtacgccacgtgtggggttagcaagagctcttaaccactggatcatctccagccttttgattttagtgtattggttggtgaaactttccattctggttttctgtctccccttgcccactctcaaagtctctttttttgctgaactttttatcagtcttgttaatttcatgtctgtatttcaggcctttgaaatctggatctataattgactttcttacttacttcatctgttttgttttctaaaaatatttttactggcagaaatcctttttccagtattggaactaccttaatatctggatttgttgattgaggaattagcttttgtatatgctatgctgatttgttttttcatggttcttgatgcacctgtctgtatgggatatctcttccagttttagtggaggattttttttttttaaactgagaaactttttcttgagggatcaacctccactatcgttcagagaggagaaaactgaggtgctataatcaaacctgatatgggaatacagttaaaatcaatgctaacttgtataattcctatgaccacagaacagaaaataactaaaagagagcagaatacattatcaccttaaattttttttaaagatttatttattatatgttaagtacagtgtagctgtcttcagacacaccagaagagggcgtcagatctcgttacggatggttgtgagccaccatgtggttgctgggatttgaactcccgacctttggaagagccgtcaggtacttttactctctgagccatctcaccagcccatcaccttaaattttattaaggataaaagtaaaagtagtaaatgaacaaaataaaggtcaaaagaaagcagaaccaaaactaagagaaaaagaaagatgaatgttagga

SEQ ID NO: 35593 - DNA, 1207 bp, Mus musculus
caggtatgaagaagagctttcagaaattggttctctccttccaccatgtgtgtcccaggctggtgctacaccttgggtcctcaggcttagcagcaagcacctttactcactgaggcatctcctccaccctgctagctttttttttttttttgagacagggtttttctgtgtagccctggctgtcctggaactcactctgtagaccaggctggcctcaaactcagaaatttgcctgcctctgcctcccaagtgctgggattaaaggcatgcaccaccactgcctggcactagctttcttttatagtaggatttatctgtacaataaaactagatgctgttttatccctctgcagtacaaatatagaagactggagtagtggcacatacattggaatcccagcagttgggaagcagagacaagtagatctctgagttgaagatcagctcaagatcagcctggccagtcagggttacacagtgaaaccctgtctcaaatttaaaaagactaagagaagctggggtgaagctcaatgatataatacctgattaacaagtacagggtggggtggggttcacatgtagcagagcaattccctcgctgcgacctattgaaagtcagccctcgacacaagggtttcaaaaaaattaaaaaacaaacaaaaaacaagtacagagccctagaggccatctccagcaacacacacacacacacacacacacacacacacacacacacacacacagagacacacacgtctgtgttagtggtaaagatgtcagtgggtaaaggcgctttctatacaagcctgacaaccagagctcaacctccagggtgcacataaaggtcaaaggagcgagctgactccacgaagttgttctctgagctccatccatgtactgtatgcactgtggcatacatcctccactaccccacaacaatactagatagaatatttcaaaaaacaacaacaacaacacacacacacacacacagagagagagagagagagagagagagagagagagagagagagaacaaaactaaatacaagctaacagggacaagcattgagagctatgcattaagatactcagggcagccatggcgcattttgtgacatgtccaatttgtgacagcagcaaatgcatactgacagaaagcatggaaagccaaataagagcaggagccaagattgtagggttctaa

SEQ ID NO: 35594 - DNA, 1198 bp, Mus musculus
tcctgtccacatccctgccattcccgacagtcagtccctttgcccaggccgcatgccggatctctcccttccccccactccaccctcctctttggagtggtccgagtccttcgtcagctctcggttcggtcccctacggtttgtaagggtctctggctccctcgcatgaccccctgcagtggccgtccggaagcgatggtacgatctttccctagcattgtcttcccctcccccacccagctcgcagtgttccaggcgacggggccttgtctgggccccctagtggcccacagcgctcttcctttctttccctcaacagcctgaggtggacagggagagggggcagctggcccagaggggggctgggcaaggggaggggccgggccgggcgctgagggcggggcttggagggggagggccctgatgggggcggagaagcgctgagccttgggcggtgctgagactagtgggagtctgcgctgccgctgctgttgctgccgccgtcgccgccgcctccgacactgccaccgccaccgccaccaccaccggccgtgcgggttttctttctttttctttctgtcttttcttttctttcttgatttgttgggttcgccatattgacgaggctgtggtacccaaggctgcggaagctagagtccgccggtggcggagccgcaagctctcggtaaacggcccattggggccctcctccctgtcccagcgaaccccctccctgcctgcaccggctcccaggcctcgcgggagtcggccgccgccgcctcgccctccagggaggcggccgcctttaccgccccagggcttggggtgggtgacgggagtgaggacaggagcggtagctaagcgagcaggcctggagtggggggacagaggcggcgactaggggaaggtgaaactgccgctgcaggaggaggagcaggaggaggtgacgcaggagaaacgcaccgcccggagcttgtctgagctcagcgcccgagcctgaggggagaagggggaagagggctgcggccggccgagagggaggcggcggccgtggtcaccgctgccctagggcggccagggtgagggccagacccctggtcggtacgcgtcgcgcgtcgcgagcccgcccgccatccgcagcctctcatatttttgtccctcgccagcccccggcttgggatgctcccaggttaggccc

SEQ ID NO: 35595 - DNA, 1124 bp, Mus musculus
tattcgtttatttttttctatttaatggatggatttttaaagtttttatatttctagaattttattattggaaccagtctttgtttaaagcaggtgagaggaaattacttgaactatatagtgatgtctggggctggaaaaccggctcagtagttacgattagagttcctgcagagaatacaagttggagttctagcatccacatcaggcagcccacagactgtaactccagttccgggggatctgacacccctctgacatgcgcacacacacacacacacactaatttaaaattaacccacatgggctggagaaccaatggctcagtggttaagagcacagactgctcttccagagttcaagtcctagcaaccacatgttggctcacaaacctctgtaataggatctgatgccctcttctggtgtatcagaagacattgacattgtagtcatatacataaaataaataagtaaataattaaaaaataacacatgtatatatatggattagtctttggtcccctatgaagtgaaatattttgtggttgttgaactacttgaattttattttaaaaacacaatacttttattattttgcatattatgtttcttttcttgctgataagttttctgaatcttgaaattgagaaacaagtctagtttccctttcattgttttaggatctgcatctttgagaaccatgttatttgttgctgtcttgtgcttttacaagtgtttgggaaggatttgcttcattcatactctggatgttagactcacttgcaagtggttttgtttatctgatatgggactgaatagaagctatattttaagagtactgtgaatgattctgatactgtatcagttaaaactgtggggctgttgcatattgttatagatcttttatagataaatacggaaatggagctttttctaactgctttccattttcaggataattagcacttatttagtattagttacactgctaatcatttaaacattctcatttattacattatataggtattattgttattataccagtggagggcctgccatctgtcatacttagctagtgggacttaagtttaacttaagtgccatattagagaaatgatact

SEQ ID NO: 35596 - DNA, 1102 bp, Mus musculus
atacctttgccatcattcatcagttaatggatagttaaggtcagggattttgtcctttactttttattatttgcagtacacttacaacattattgatctccttgaatggcaaaattggggtcctatttgatttgcttgcagtaccagggattgaaaccaggccttggacatgctttagcaagtgttctctttgccactaacctgtatgtatctccaatgccattctttcatcttttatttactttttattttgaaacagagtctcacagacttgctgaggctggttttcattaaattcattttcttttatttttttatattatttttatttatacaaatacactgtagctgtcttcagacacagcagtagagggcatcggatcccattacggatggttgtgagccaccatgtggttgctgggaattgaactcgggacctctggaagagcagtcagtgctcttaactgctgagccatctccccaaccggaagttcattttcttttgactgactaattgtaaagataaatgtcacagggctgatattctgaaagagtttttaaaaagttgcatgtttattggcagggttagctaacccttgaacaaaacaaaaggaaaacttcagctgggcatgcaagcctttaattccagcacttgggaggcagaagcagagaccagtgttctcttgagtttgagccttgctactattctacatagctacatagcaagactttgtctcaaaaaaacaaaacaaaacaaaaaaacaaaaaggccaaaactttttgctcttaagtttttaaaaattagtgtatcttttttttttttacaaagtatttttacaaagtagcaagcctcaaactcaagagaacactggtctctgttttttcttggagacagtgtttctctgtgtagccttggctgtcctggaactcactttgtagaccaggctggcctcaaactcagaaatctgcctgcctctgcctcccgagtgctgggattaaaggtgtgtgccaccacgcccagcagtgtatcatcttgtacaaaatgaatttcattatttctaaatgttattgtgtactttgatcattatacctccttattacc

SEQ ID NO: 35597 - DNA, 1214 bp, Mus musculus
acttctgtagataacttttttgttcaaaacttaacataaagttgattttagtatgattttacaactttatttcccactttaaaaaatgtcctattcactttttaacttttatttcccatactctttttttttttaaagacagtttctacttttttgtagtagtagtttgtttttctgagacatagttttatgtataccaggctatgctgtaactcactgtgtaggtgaatgtgaccttaaacctcctacctcctgaatgccgggattataggagtgtattgccatgcacggtttatgcagtgctgagtattaaaccagggctgtactaacaccagacaggtactacaccaactgagctatattcctagcccatagcttctatttgacagttgaacgtaatcaggaattttataaattcctccattctgagaatggagaaacactgttatttagctttgagagatttgaattctttgaaagaggacaaggaagtacacttgaggatggagtagtattttttttaatttgttttctttttgttgttgacttcgagacaggctttcatgtttctggtctcaaactcatgatcttcctgcctcaccttcccaagagctggtagagaatacaggcctgtaccaccatgcctgtctcgttttttccctccttaaagccagtaacttaagtgtaatctcttctggcctccagctccctgtgatctttgatcttcttgcttcagcctcaatcaagagtgctaggattatagtcaggaaccaccaggtctgactggggaaagtggttgtagtgtatagctgaatgaagactaaagaatcttcccatgaatttattttttgtgagagcttccccttcctattatgcattgaagttaattagtcatataaatgtaagctcggggttgttttaatgccctttcttcctgctttccccaaatacttctcaaaatgcttgcaccagatactgtgccagttccataagaaacaaaagtcattttgacagtctgcttttgcaaggttctttctcattctcagacctaattggtcagtagttggtgtagtaagtactccagcccttcataatccctgtctctgcaccccttcctctgtgtattaggtattgtaacaggttaataaggaatgtcttcctttccacctaccataccctcaacaatcccaaagacttagattatagttgtaact

SEQ ID NO: 35598 - DNA, 1169 bp, Mus musculus
atggaatctgaaattcaaggtctaggtgttgataggtttgcttggtttttttttctttttaggaatgtgtgtgtcagtctgtgttgtgtgtgtacctgtgtgtgttggagaacgtgtgctgtctttgttagatgagtagtgtgtcttaaacattacaagtcagttatgcttaatgtcctcagtatagatgctttggaatatacttaaggcattagccagttaaggtcagtttgccccattctaggatttaaccaagtagcagctaacttcttgataacacttgccttgaagttagttccagaagaaaattgaaattacttgatacagctaaactggtatactggctacagtacattctttaagttgaatatagcaatgaagcttcagcttttccctttttacctgtcatttacatagtcatgctttcttgacttgattcactggtgatgatactaaacttgaatagtttatgcttgctatatctaaaataaaatattctcttttctcttttacttacaggttatgcaatggtctctgcaagatgttttattcttgaattggaaccttttacgactgacaaatgctggtactttatctcctataagtggactataatttcttttcttaagacaactacataagcagacaaaattgcaaagatctgccctgtgtcgagtatgacagccacgactcgtggctctccagttggagggaatgacaaccagggccaagcccctgatggacagtctcagccccccctccaacagaatcaggtaagaaattaaagatacaagttaaagccacattgctatgtctccttaactcttaagtgctaagtaaggaaatgtgatagaattgccaagtaaccataaagtgaatattttaagaaaagtagtaaatgcaggttttcagtagcaaaatacttaggtgctgaaatcaacattgttttctgattttttttcagatgtcttacattcttacattatcagtcttcaataaaaggaatgaattaagcttggtatcaatcctgggagaaaccattgtataatttagtgtagcatatgggaccaagaaaattataattctattttgtatgccaaatacataaaatcattaattgtcaatctaaaatatgagtatgtactgaagtattattactggtgtttaaa

SEQ ID NO: 35599 - DNA, 1806 bp, Mus musculus
cccaggtctcagtttctcataagctttacatatatttacttaaagggaagttagaaataataactcaatcgagtcagttctctgcactgtgtgtgtgttctgggtgtttaattcaaggcaataggctcagcagcaagtgccttccttactcagccatcttgctgaggcccataaagggaatttcttaataaaaattttaactttaaaatctgtacctgtagaagcaactcttaagttataagacataaaaaccagtaacaagtgggatgaatattcctcagatgcggtatctgagaaggctctggattataatttggcaatgtgtgccaatagctttaaaagaaattttctatactggtattgttatatttctagtattcttaaaatttgttttctacaagaagatttatacttgacaatgctttatttaactttaatttatgtaatgctgaagaatttgaatacttaagatactgaatgatggctcagcggttaagagcgctgactgctcttccagaggtcctgagttcaattctcagcaaccacatggtggctcagtaccataatgggatctgatgccctcttgtgtgtctgaagacagcgacagtgtactcatatacataaaataaatctttaaatagatattgaatggataattgacagatatagttccagttttatcgaaaatttatgcatgcatggccagtttttatttagctcataaaaaagtaacaaggggtcattacaatgtcattactggttttttatttgttggtgtggtgttatatatgcttacagttgtttttgtctgtgttttttgtaagaatatgaatacacaaggcaaagtgttttgttgtttaaaataaaacaggcttctaaagttacatactgcagatagcttttttgtatggggtttctagcacttgaattctttgcttggcaacttagctgtttgttaagtgtagtagtctccattttaagtataaaagctcaccattaggttgttagtctgtcttggaaattcagcataaattttggaaggagaacatatcattgaaatcataagctttcaatgatgtctttgtagaattttatgttactaacatttttaaaaataatgctaatatgttagtgtttatgtatgtgtgttaatagaaacttacatctataatgttattttgttaatcaagacttcatcgcctgattcgtccaatgaaaattcccctgcaactcctcctgatgagcaaggtcaaggtgatgctcctccacagattgaagatgaggaacctgcatttccacacactgacttggcaaagttagatgatatgatcaacaggtcagttggtttcatttctaaaaccaaggcttgtttgtttttattatagcattatgtgtggtgggtaacataatggcagtgaagaggaactgttgccttaattttcccattatagtcactgccaagtactttacaacccatggttcatgatgggtctaataaaaaggagcaagaacatgctcttatggccttagctgtttgttccaaagtagaactagttatttagttttcctttttaaaagttggtgaaatttctttacaattgacatgttcttgactgactttaataactttagggggggcatgaaacaaaccagatcataaggagtttcttagaatgtccttcatgatgttctgcagggtaagaaaaggttgtaaagaaatgagaagaacatatcaaaaaccccatctgagcattgtccttaccgggcagtgtgagttcaacaagggccgctcaaaaaaactgggca

SEQ ID NO: 35600 - DNA, 1269 bp, Mus musculus
aagagacaaaaacaatcagtaatcgttatttgtaggatgaaattagagtttacttcaacagtgaaaagaagttgtttttggactaatatgctattatgatacaaacctgtttctatgtatgcaaatagccataaacaggtgacgttttgtggtctgaatgggtttttcaattacaactatggggtaaaagtcccacaatctggtttaacataatttcttagatttagagcttggcaatgtagtcttctatcagggtaagtgatacattatttcaattttagaaaaaatgggaatttgtatcttatctgaagataacagcagaatttggcaactcataggacctacttcatttttaagcaagtagctttttgaaagcaaattaattctgtcagtactagtgaatcaactattatctatcagtataaaaaacaaggagctcatttaatattaacagtaattagggttatatctgtttgaaattgcaatgttttcatattattaatcacctttctctcatatataatagagatgcattattaacaatactcatcgcctggtggagctatgtgtggctaagttagcccaagactggtttccacttctagaacttcttgccatggccttaaatcctcattgcaaattccatatctacaatggtacacgtccctgcgagtcagtgtcctcaagtgttcagttgcctgaagatgaactctttgctcgttctccagaccctcgatcaccaaaagtatgttaattattttcaaatttaaatattaagatagttctaccacagaactgtaatattagtctcctagtaacatggcttaacactggtttaattatactcaaaaagacgttctgcattatagtttgaattctttattttgtaccacagctatattttattgtttgtactactatttagtttttctgtgtagtaataattgacatctgacaaccaagtattttttgagtattatatataatatagcactaggagcctttttgcatagtcatagcattttagttcagtgcttatggcttcttaatttttttctccatgttaattaactatacttaattcctgttatcttttagtcaatctgaagatagtcatagttggattaatataacatttcaatagtagtaataacaataatagagaaggacattatgactcattaaaaacctcaggtgtgaatcaataaggccatgatgattttatatattctaaggttgttaaggttgtttgtttgtttgtttgtttgt

SEQ ID NO: 35601 - DNA, 1155 bp, Mus musculus
gaagtttatcaaacctatgcctttgctcatggtagtagatgtttaattcctgcaacatacgggttagttttcagtagacaattcacttttaggcttcaagattatttatatggaaaatttaaatacttataaactacaataagaaattgtctcagaagttgttacactagattttctttgatctattattacttaaggtctttttaactttttaaattgtttttcatataagtgtttttaggtattttggaaagccatatactctaaaagtcggatagctgagacagaaacatagtctaacaagtaatactgatatgagcagtgtgtttgttcctttaatctaattcatgcttactatttattgcttctgcttcacagatcaattactatgatcgttttgaagccttttcaagaatgacttaacattaattggctttaatatatcagtcaaaatagtactttgtttatcctaaatgccaagaaagtaaacttgttaattgtattgtagggttggctagtggatctcctcaacaagtttggcactttaaatggattccagatactgcacgatcgttttattaatggatcagcattaaacgttcagataattgcagcccttattaagtaagtaacattttaaagccacatgttaaatatgttattgctgtttttattttggctcaattcagaaatggagtagttggagctggagagatgattgctcagtgcttaagtggctgttctttcagatagtaaacgtgaggtttattccctgtacctatggcaggtagctcaaaactgtctttaacaccagctctaggagaatccagcgtctctggcttctgagggcatctatctgcctatatacctaatccaaatgtgaatacatacacatagaatgtcttaaaaataatacatgtcactcgggaggcagaggcaggtgaatttctgagttcgaggccagcctggtctacaaagtgaattccaggacagccaaggctacacagagaaaccctgtcttgaaaaaaaaatacatgtactatgagaatttactaagttgaggttaagaagtcaagtatttacgggggttttcttttcttatttcagaccatttggacagtgctatgagtttcttactcttcacacagtgaaaaa

SEQ ID NO: 35602 - DNA, 1170 bp, Mus musculus
ctggcctcgaactcagaaatccgcctgcctctgcctcccgagtgaaatcaaagtgttttaaaaagtatcttttaacctaataagaaaaccattgtggggcagaattagtttaaggaaccaaacaccaaaaatggccctctgcccattcttcttaaaccttaagtgattgttgcatttaaataatatttttatgagttaaatgctggaatgtacaatatctttttgatgatttcagtgtttgtaatttatggagatatttattccccaataaattgctttgtcagatatgatagttcccagctttaattccagcacttgggatggatatggaggcattttgaagatcacaaacttaagactagcctatgctacatagcaaaatgccatttcaggagaaaagagcttactataaatttttttaagcaatttttatgaatacaatgcattcttgcatattatcttgtacatatgcttttggctttctatgtattctttaaattatattttagtactttaaaaaggtcttcgtgttttattttgttttgaaacctggtttttaaattacctttaggaatggatacagcagaacaatattttatccatagttttacgagatagccttcatcaaccacagtatgtagagaaactagaaaagattcttcgctttgtcataaaagaaaaagctctgaccttgcaagatcttgataatatctgggcagcacaggtaaggctcttgaaacctcttaaatgcttctggaagaaattcttctagaaacttcctgaaattgtcaataatgcttgaatacttaacagttcatatttggcaaaagttaaagaggcaaaaaataagggaaactaggtgtggttgtgtatatctgcaatctcagcagatgaaagtgtacaagtaggagaatcatgtatcggaaggtaacttaggcttcaaagcgagcgcaagcttctgaccgagaaatcaaggatacaaacagctcagtggtacactgtatttgccttagtaccacaaaataaagtaatatttgttgggaaaataaatatacatctatcattgacctcttaatagacttagcaactcctcagtatagttcactcactcaattccaaaacacttaaaacttttcagaaggattagcaacctttctgaaaaggttttaa

SEQ ID NO: 35603 - DNA, 2090 bp, Mus musculus
gaatgttttctgcatttttaaatacatcatacacatttcacacatgcaaagataaacttttccccataaagacagctgtagtaagcagttattgtgaatgcccttaagttaatagtcattcatccttcatgttgaggtgactcctgaaatagtggtgaagtatgaccagtgacagacttgaaaaaggaaaaagtataaaacagtcattacatcatttgggtcttctttctcccaggataatctcttgatacttccttaataattagttccttaatgattaattgattccccctttggattatcaagagcttgctaaatagcaagcacttttttatagttggggagcatctcactgtatatccttggctgcttggaactcactgtgtataccaggtcgccctcaaactcgagagatctaccacactaccttaaaaatgaagaggagaaaatgaaataagggttttcatttcatttaaatatctttctaggccagttggacaaatgcaagtaaaaagcaacgtgaaaagctccttgagctgattcgtcgtcttgcagaagatgataaagatggtgtgatggcacataaagtattgaaccttctgtggaatctagctcacagtgatgatgtgcctgtagatatcatggatttggctctcagtgctcacatcaaaatactagattatagttgctcccaggtaaggaggtggtgtttggcttggttgtattacttttgtgcccctacagtactaggtagtatggctaaagtacaggataattttaggttattttagcattatctttttaatgattttaagaattgatgtttatttaagcctgcctttcttaggtctctacaataatgttttaagatccatctgagtctctggaagaggaggtacaaacaataggccatttagtgataatgttgtcaaatgtatggtaaaggaatcaaatagatcataaaatattaaggctgagttagaaactttggaaataaatattttctttgctcataaaagataaagaataattagaattttctaggtagtagattctaatgtcagggtgttgcattagcatgttaatgcatgattttattatgagatagaatctttttaagttaaaacaaatctcaaacctagtaaattataatcaaactttactgaatgtatgtgataaattttaggattttactttttagagtttggtagtaaatatgaagttaagatatacctagagcactttaaaaaaattaaactcttagagttacagtatattttatatttatcatgttaatcttataagaaaaaccgactttataattccatggattattggaatttagcttaatttccttatacatttatctttaaatactgtgacttagaattttcccgagtattgatctatataataaaacactgaaattgtttaaggaccgggacacccaaaagatccagtggattgatcgcttcatagaagaacttcgcacaaatgacaaatgggtcattcctgcactgaaacaaattagagaaatttgtagtttgtttggtgaagcacctcaaaatttgaggtaagacttttaaaactagacagtttaaatatttttatttatggtttgttaatttcaatttgtaaaagaaaattttaaagaaagttaatgaagtgccaggaaactaagaagaaaagggctccttttggaacaaaagaatcttttgtcattcctacatcctttgtttcattgatatggaaagtaagccatgattaagtgatcagtactaaaatctaagtgatcttgctgtttgatgctgtgtcacatggtagttttcacaccaaaaaaaaaagattgtttttttaatttttaaagttagtttagaagattaaattgcatggagatttaaatgatagtagatggaatgatagaacactggattttttaattttttaagatttattttatttattatatgtaagagaagaggacatcagatttcattacagatggttgtgagccaccatgtggttgctgggatttgaactcgggactttcagaagagcagtcagtgctcttaactgctgagccatctctc

SEQ ID NO: 35604 - DNA, 1246 bp, Mus musculus
atttaattacttaactgggaataatagaagcccaaccagagacaaaagaaccttatttttggtacctcttttattttagcctgtgctaacacactttctattttacctcctatttgattaacaagaaagagtcagatattttacagtaaccagtacaaatgacttgcttgcttcttccttccttccttccttccttccttccttccttccttccttcctttctttctttcgttcttttgttcttttctttgttttagtttgtctttgatttttctagacaggctttccctgtgtagccctggctatcttggaactcagataaaaactgagaaacaagttcaatatatatgattgtggtatcggtattatttcatacataaacgggtaggttgtatttcaggatatatgtcaaataaattttttttatgtttttctaaggtttttattgaaggatggccagctgtggctgtgtgctccacaggcaaaacaaatatggaagtgcttagcagagaatgcggtttatctttgtgatcgtgaagcctgttttaagtggtattccaaattaatgggagacgaacctgacttagatcctgatatcaataaggacttctttgaaagtaatgtgcttcagcttgatccttccctgttaactgaaaatgggatgaagtgttttgagagattcttcaaagctgtgaattgtcgagaaggaaaactagtagcaaaaagaagagcctacatgatggatgatttggaattgataggattagactatctttggagagtaagtcaaaaataggagctctgtcaacattgtacttgatattgtatctgatgcttgtctcaggagtctgggttttatccttatctcaagtttgtgtgttccttactagcattgtttaacattcttttaaatctaaagtataaggttgatctattgcaggctaaagtgtcttttatgatattttatacttctatctttaaaacttaggttggttaaaactgcttctgtttttaacttattttagatgtctgcaaattatatacatacacctaggtgttccatgtggtatttgagtacctaaacttttcaaataagtaaagcttgaagttttggggtgtttgtttgtttgtctgttttataagcagtggaggggcttgaaaggcagtgcatacttaaacgtacattaagccccaggttcagtcttcagcacatattttaatgttacaaacccttctcttaatccaa

SEQ ID NO: 35605 - DNA, 1963 bp, Mus musculus
tgtattgctttactaagcagaatgagttgtttttcctaagagctatctccttccaggagtttaaagattatttttaaatatgccaaagtctgttttaagctcttcatagcctctcttctctttctgtttctgttttccctctctgtttctttttgtctgtctctgtctgtttctgtctgtctcttttgcactctctaagacagggtcttactatgtaggttttgctggcctagaatgcacagagatccacttgcctctatctcagtggattaaaggtttgcaccacagtgtgacaggctccttttttctgcattctctcaatgtttgagaatatatatatattcagttttttgagtactgtgatgtctttcagtgaaataaactaggtaatctgaacgtcataaagcagaaaataacttggaggtaaaaactgttgctgttacttacatttcctttggaagtgggttttttgctttgttttgttgttttctttaaatcagtctccaacagctggaaactgttgactggaggctcctggatgagagatggtctcatgtttaggctggctgattaaaaggcactggttggcattttggttctcatttgtttacttttaaatcaacccaagttcggtcatgtattacagaagctcaactgaatgtttaactgaattgtttgctgttttgtgctcttgaaaatgctagaagtgatatagatgtgaattgtgttttatttcagactatgcctctttctcttacagatagtacgacaatagaaaagttaagagctatttgtttggaccatgccaaacttggagaaagcagccttagtccatctcttgactcacttttctttggtccttcagcctcacaagtgctatacctaacagaggttagttttttgtttttggttttcatttttggatttagttcttgtttaaatttgatccttgatgtgctgctatgaagaatgtggataagattattataaggtggttttgaagtggtcattgtcttagcattcttgatggtgaaatggaggttatgttttaaatcccttttaatacaatccttctcttctccctctcccccttttatttgcaggtagtctatgccttgttaatgcccgctggtgcacccttgactgatgattcctcggattttcagtttcacttcttgaaaagtggtggtctgccccttgtcctgagtatgctaaccagaaataacttcctaccaaatgcagatatggaaactcgaaggggtgcctacctcaatgctcttaaaatagccaaactgttactaactgccattggctatggccatgttcgtgctgtggcagaagcttgtcaaccaggtgtagaaggcgtgaatcctatgacatcggtaatacagactttgttttggtttctaaaatatctagtagtagatagtcatttttaaggttaaatttctcaatgattctaaagtctagagtttaattttgactcagtattaaaattttctttccagtatatgtcttgttgatagaaatgttcacttatttctctatatttgtattaaaaatacacacactcgaaaaaccaaaaaaaaaaaaaaatacacacactctaccctggctttcctactactaatttaagagaccatttccttcagtttctttctgaccacttgagttttactacactctaacttactgtgaaaaaaaaagccacataaatgaatttctaacttgtgccaagcagataccagtggtgttaagattttgtaattgatttagccttttgccagtttctgtcccatcttccttggcttaaactttaattatgaaggccttatcattctgtcttcgcctggatctttgatccattttcctgatctcaacatatgctatagtttaatgactagttaaaggcccaactatgcaaatagttgctaaattactgatagaagacaaaagtctttag

SEQ ID NO: 35606 - DNA, 1196 bp, Mus musculus
ctttgagaacatggccatttgctagctgtagatactaaggtattgtaattgtgaagtatttgttggcaattgaaagcaaaataaaaatttagtaatagggatatcttaaacatttacagtatagagaaaagttacaactcaaaatcagaagtattcagctactttatctgtttctcattgattaaaacacttagtatacaattacataaaagtactgctatcttttgtatgttttatttttttataattgtaatttttctaattttcaaagtagaacttgataactggagattatgagcagggtctgcctaaggatacacatttaaaaagatatgatttactgcattttgagatgagtttggacttgatctgttcatagaaacatgggttagatgaatctagaataggggattgtagagaaatctgtgccacttgcataccatgttggcagggtggaatactttgcatgtgaatgtggaaagaaaacatcttgggaatgttgatgaacgccataggaatgattgggtcaagttgtatacagaatactcaaataaaatggttaactgtttttcaggtcaaccaagtaactcatgatcaagcagtggtgctacaaagtgcccttcagagcattcctaacccatcatctgaatgcatgcttagaaacgtgtctgttcgccttgctcagcagatttctgatgaggttagtattgtaagagttatatagggggagtgtgtgtgtgtgtgtgtgtgtgtatttatttacaatgttttacctgtcataattgttactatacaattttttaaaagtttttattctgtgtgttttgcctgcatgtaagatgtctgtgcgcagcttgcatgcctggtgcccttggagatcaaagaggacttttggatgctctagaactggaactacagactgttctgagcttccatgtgggtgctgggaattgaacccatatggaagagcagccagttctaaccactgagctgtctctctaacccaaaacaacctttttaaaaattcaatctagatcattgtttaatgccaacttagtattattagtactttattttcaaattttgcataatagcattctttcagagtgtatatacaatatttagtattcacacaaacagtacacaataattgttctgtactttttttttttttttttttttgcagtcaatacttc

SEQ ID NO: 35607 - DNA, 1148 bp, Mus musculus
tattggataatggtgccacagttagacatctgtgtacattataaaaaatagtatgaatcattctagttccatttaatcatcttcaaggaaaattgtataaaacacagtagttctctgtcatgcttttcaaatcaatactacagtataaagaagagttgtagcagtatcctttctatgatagcataattcccactggaccctcttctaaggtacacctggatcaaaattctgtggaagggggactggtaggtgttttaaggtttgatatggggcattttatatctattagagcctgttcagaaaaaggttagaaggtattcctcaaactcttcagtgacagtatgaggtcatagccttgaacatgcattagtaaactcatttacatgttatttttccatgactatttaagtggatgttagttcatgttcctaatgtatcacccccttccccaagagaaaacaatatattaaacataaatcatttccatttcagaactgttcgtcaagtggcacaggaacaattcttcttaatgtgcaccagatgttgcatggggcacaggcctctacttttcttcattacgctgctctttactgttttgggggtaagagatttaaaaatatgtttaccagtgtaattccttcaacaaggaatgatattctggaatttgtggatttagcttgaactagttagggcaatctatacttaataaaacaatagttaactcagggtttttgaaaagggaattcaaagtataaacatattgattcactatactgtattttatcattttcagagcacagccagagagagggctaaacactcaggcgactactttactcttttaagacatcttcttaattacgcctacaacagtaacattaatgtgcccaatgctgaagttcttctaaataatgaaattgattggcttaaaagaattagggtaagttgtagttaatactttgtttatattgttaagaaatagtgcttcatttataaatggttcataatttagaacattttaagcttaaaggggaccaaagaacatacattacattgttgggttttactttatagaatagaatgcattactacttacagaaaacatgtgcttaagatttaatacaagctaagcatggtaccacatgtgt

SEQ ID NO: 35608 - DNA, 2101 bp, Mus musculus
aaaacctcaggtgacagcagatgttggatgtggagaaagaggaacattcctccattgttggtgggattgcaaactggtacagccactctggaaatcaatctggagattcctcagaaaattggaaatagataaaacctgccttttaagaatttttaccaaggttttacaatgtttgtttagataatataaagcactagttagtgtctttcagtaaccattgcatgtttgtaggtgttatatgtatgtaaaatgtaagtgtaaagtgttacttagtttatgtctttatacctttaaaaaaaaccaagaaactacatgtttggtaaataggtaaaagtagaatatttttattagaaaatccacaaaaaatttctgtgatataagacttaaagacagaaattctaagacaaatatttctctttccagattatgtcactgctaatatttaatcctttctttcaactgtttaggaattaatcgacgacttcatctttcccgcatccaatgtttacctgcagtatatgagaaatggagaactccctgctgagcaggccattcctgtgtgtggttcaccagccacaattaatgctggttttgagttacttgtggcattagctgttggctgtgtgaggaacctcaaacagatagtagattctttgactgaaatgtattacattggtacagcaataactagtaagtacttttaaacatatggttatccttgacatacacagagccagtgactttgatgccctgtattccataaactaggcatggtattaatataatcccagcactggggagggggttataaaaaacatataaaaacaggaggatcttaagttgaatatcatcctcagttacattgatagttccagtccagcttggctatatgagatactgtcttataaacatacaaataggatcatagattggtaggtgagggagcctgcaatgatgtgggttgctgtcttttttttttcttttttaaagattttactttatgtatatgagtacactgtagctaatcttcagacacaccagaagagggcatcagatcccattacagatggttgtgagccaccatgtggttgctgggaactgaactcaggacctctggaagagcactcagtgctcttaaccactgggccacctctccagcccatggattgctgtcttaaatgcatttattaatggagaaatgccatgtgagagccctgcctcctgtgactgctcaggtagtagtgtctgtgttttgtcagcttaagagaacttaaacatcataaaatcacttctgtctttgtttttcagcttgtgaagcacttactgagtgggaatacctgccacccgttggaccccgtccaccaaaaggatttgtggggctgaaaaatgctggtgctacttgttacatgaactctgtgatccagcaactctatatgatcccctctatcaggaatggtattcttgccatagaaggcacaggtagtgatgtagatgatgatatgtctggggatgagaagcaggacaacgaggtaaatttcttttatcacttctgttctctgtgaaactcttgattaacaacattctttcattagataccaagggaataagtacagtcaccagtttccacaggattcccctccaaaagccctcaacccaagatggcaaaatttgccaatatacaagtagtctaaatggaacctacacaaatctattttcatactttaggtcatctgtagattacatcaaatctctcatacagtgtcttatataaaagtctgggcatacttcgtgaacccacagataaatgttagtggatatgaagatttgattgtgttgtgatttccttccttagactgtccaaagtatgtttgaaggttggcacagcctctgccacttgggctacctcttagtggagtgtgtctccattacagcagttacaaagaatccatctctttgaaagtagtgtttgatagaagttgaaatttaactagtttaaatcgacaatggccaaccttttggcttttctgagccatattttggaccaaaatttgtcttgtgccacacttcctttcccttcccttcccccttttttgtttctgtg

SEQ ID NO: 35609 - DNA, 1149 bp, Mus musculus
gccagctttttgtattttaaattttgaattgtgggtttaaggagtcctctgtctattcaggattctacctcctcatcagataagtgattttccctttttcctcccactctgaattcattgcctctcttggcagtatttttatataaaagtttttcattttcttgagatccaacttgtttgtaccttcaacatcatagtaagaaattgttatcagctacaatgtcttaatgattttgccttccaagtttggttttattcttttaactctaacttttaggactttggtacaaattgttttttctatgtaattttaaggagagctcagcttcattttttttataactattaatgtctatattctcacatgaaatggcaggaacaaacactaactgtaaattaaatgtatacaccttttgaaaattaagtgcttggaaacaaagtaaaagtgtatgttcactaactggaatttatctcaacatattttactaaacttctgattagctcattaataatacctttttggtttctagagcaatgttgatcccagggatgatgtgtttggatatcctcaacaatttgaagacaaaccaccactgagtaaaacagaagataggaaagagtacaatattggtgttctaagacaccttcaggttatctttggccatttagctgcttctcgactacagtactatgtgcctagaggattttggaaacagttcaggtaaagtagatggacagtgataaaccacatatcttaataaatagctcatattcctaaaatatgtatcttaagatatctttatgttctagccttgattatgaaaatataagatgcatatacagtagaattatcgtaacatatattccttcctactactttctaaattattttgagacacagatcacagataatagtttcacctataaatacttcattgtgtgtctttgttttaaaacataatgaatctattactgtgctttttaaagatcccttgatattgaatatattcagcatttcaactttcccattatctcatataatttttcccaaatctgaaaccatgtgaaaaccatatagcttaaatagtattttctctcttttttttcctgcatgttctttaaggtgcccagtgagatccagaggcttga

SEQ ID NO: 35610 - DNA, 1178 bp, Mus musculus
agccagcctgagcttaagagaattagaaatgtagctaaaggatgactgcttgcttaacatgtgtgacaccctgggttaactttcagatttggggatggtagtgtttgcttggattttggtttactttttgcaatggattgtatctattaattttctctattgattttaggttgatactgtaaagcgcttgctaattaaaaaattgcctcctgttcttgctatccaactaaaacgattcgattatgactgggaaagagaatgtgcaatcaagttcaatgattactttgaatttcctcgagagttagacatggaaccttacacagtggcaggtgttgctaaactggagggagataatgtcaacccagaaagtcagctgatacaacagaatgagcagtctgaaagcgagaaagcaggaagcacaaaatacagacttgtgggtgtgcttgtgcacagtggtcaagcaagtggcggacattactattcttacatcattcagaggaatggaggggatggtgaaaaaaatcgttggtataaatttgatgatggagatgtaacggaatgtaaaatggatgacgatgaagaaatgaaaaaccagtgttttgggggagagtacatgggagaagtatttgatcacatgatgaagcgcatgtcgtacaggcgtcagaaaagatggtggaatgcatatatacttttttatgaacgaatggacacaataggtcatgatgatgaggtgataagatacatatcagagattgctatcaccacaaggccccatcagattgtcatgccatccgccattgaaagaagtgttcggaagcagaatgttcagttcatgcacaaccgaatgcagtacagtctggaatattttcagtttatgaaaaagctactgacatgtaatggtgtttacttaaaccctcctccaggtaagtgtcaagagttcgcttcttatagcaaagagtaattcttatctttaagatttattagtaggctgtgtgtgcgtgagtgcgtgtgctgtttttttaagatagggtttctctgtatagctctgaatatcctggaaatcatgctgtcggccagggtggcctcaaactcagagatcacttacctttgcctcccaaatgctggaatcaaaggtgtgcaccaccatcgccctgctatctttattcatatctataaat

SEQ ID NO: 35611 - DNA, 1425 bp, Mus musculus
caattaaatatcagtatgctgaattaggcaaattatactcagtagtgtcacagctcatccgctgttgcaatgtctcttcaagaatgcagtcttcgatcaatggtaatctattcttggcaatagttttgagtactctgggtcatatctagaacttgatcaaatttggttctgaaaatacttaaatacaaagtgagggtgtgaaggaaggtccactcttgaaacattttacaatgtttgcagtactgttcctttttcacatgattattggacccttttctgcttgctactggattaaattagtaaaatttttatgttgggataccgagtcattgaaacacactactattcttagtgcttagaaaaattgacatacagctctttttttttttttcctaaaacacatttataggctatgttctgataagtttacattgttattgtggagacacttactggttgttaattgacaaatctgtattgtaggtaatccttctcttccaaatccttttggtgatcctaacttatcacaacctataatgccaattcaacaaaatgtggtagacattttatttgtgagaacaagttatgtgaagaaaattattgaagactgcagtaactctgatgagaccgtcaaattgcttcgcttttgctgctgggagaatcctcagttctcatctactgtcctcagtgaacttctttggcaggttaagaaatcataaccattgttaaatctctatgatttgatttattacccatatgtactttattcactgtgtcttaacctatttctaggttgcatattcttatacttatgaactccggccctatttggatctgcttttacaaatcttactgattgaagactcttggcagactcacaggtggatactttattttttttttatcaggctaattagacttagtcccggctgttacatataatagaaattgaccatccccacatttaacaaaatatataacaaaagcaccctagggttctagtgaatgttcagtgttacaagaaaaaactcaagacaggaatgactaccaagttctcccagattttgtcagtttgtttttgttttttgttttttgtttttttttttttacaatgaggacattgcccaggtttcatacttaatatattaacatcatgtgccaccacgcccggctctgaattttttttttaattaaagaaaactagcaatagactttatacatatgaatttattaataaatccaaggattgttttaggtttagattacattacttttggaactaacctcattacataaatctgtagttatttagtgatagttctggagagcagagcataaagacacatgcttttaattccagtacttgggagataggcagtcagatctctgtgagttcaaggccaatcagggctacaccaagacctt

SEQ ID NO: 35612 - DNA, 1243 bp, Mus musculus
ctcagtaatacaggtagatgtcattttgtttattggcagctaatgtctaataaaataaacaggccctgggtatggtggcataagcatgtgatctcggcagtttggaggctgaggcagtcatattgagaggtcaagatgattctggtttacataatgaaaccctgtctcaaaagcaaaagacaaaaatgacttaaagcaagttattgtcaactacagtgtcagtgttaacttttaaagtttgttactcttgagttcagaatttgcttctagtgatgtatttaaacaatgcaatttgaacaagtaaagttagtaaggatacagacttgagtcaggctagttggcaactgtatgaccctaggcaagctgtttctatctcctcatctgctcaaaggtttaatagtggtacttactgtctattaggaaacaactgaacccacagacatttacggggtagcatgtaataaacactcaatagataatagcttcttttaatttttagaagttttatcttccatctgaaatgtttttcagaattcataatgcccttaaaggaattccagatgaccgagatgggctgtttgacacaattcagcgttctaagaatcactatcaaaaaagagcataccagtgtataaaatgtatggtagccctctttagcagttgtcctgttgcttaccaaatcctgcaggtaagggtgttttcttatttcatagaaatttaaattggagttaaaagatcctgttttaaaaggctgtagctctgatatactgcttacccagaatgtacaattccccaatatgacaaagaataagaaaggaatgaaaaatagcattaagatactattttaatccaggtattggggcggggtgaggtacacatctgtaatttggacattagaggccaagtcaggggaacaaccacaggtttgacaacaacctgagctatgtaacaattaccagacagccagagttgccatggcaagactatttcaagaataaaaaatatcctcagtttgtgggattatcattttaagttatctatgatacactcccaatcctcttaaatgtacatgattttatttacttttgaagggcaatggagatcttaaaaggaaatggacctgggcagtggagtggcttggagatgaacttgaaagaagaccatacactggcaatcctcagtacacttacaacaattggtctcctccagtgcaaagcaatgaaacatcaaatggttatttctt

SEQ ID NO: 35613 - DNA, 2139 bp, Mus musculus
tggctcagctgttaagagcactgactactcttccagaggtcctgagttcaattcccagcaaccacatggtggctcacaaccatccgtaatgggatctgatgccctcttctggtgtgtctgaagacagcatactcatataaataaataaatgaatcgtaagcataattttaaaagtgtgcctgtgagttcaggtgtccatggagatgaaagaggcagttgtgagccacctgtcatccctatgggaacctaacttgggtccacgagcagcgcccattcgtaacctgtgaagccacttctcccgccctcacataacttgcattgtcacttacattttagctttattaatctttaagctttgttataaatgatatcccttgaagagagcaaacagttcagtaaactccacactcacatacagagccactataaagacacctggctctctatctgcggcgtgtggcggcgagatgtctcacaggaaattctcagctcccaggcatgggtccttgggcttcctgcctcgaaagcgcagcagccggcatcgtgggaaagtgaagagcttccctaaggatgacgcttccaagcccgttcacctcacagcctttctgggttacaaggctggcatgacccacatcgtccgggaagttgacaggccaggatctaaggtgaacaagaaagaagtcgtggaggctgtgaccattgtggaaactcccccaatggtggttgtgggcattgtgggatatgttgagaccccacgaggcctccggaccttcaagactgtatttgctgagcacatcagcgatgagtgtaaaaggcgcttctataagaactggcacaagtctaagaagaaggctttcaccaagtactgtaagaaatggcaggatgacacaggcaagaagcagctggagaaggacttcaacagcatgaagaagtactgccaggtcatccgcatcattgcccacactcagatgcgtctgcttcctctacgccagaagaaggcacacttgatggagatccaggtgaatggaggcactgtggctgagaagctcgactgggcccgagagcggctggagcagcaggttcctgtgaaccaggtgtttgggcaggatgagatgattgatgtcattggcgtgacaaaaggcaaagggtacaaaggggtaaccagtcgttggcatacaaagaaactgccccgaaagacccatcgaggtttgcgcaaagttgcctgtattggagcctggcaccctgcccgtgtcgccttctctgtggctcgagctgggcagaaaggctaccatcaccgaacagagattaacaagaagatttacaagattggtcaaggctacctcatcaaggatggcaaactgatcaagaacaatgcatctactgactatgacttgtctgacaagagcatcaacccactgggtggctttgtgcattatggtgaggtgaccaatgacttcatcatgctcaaaggctgtgtggtggggaccaagaagcgagtacttactcttcgtaagtccttgctggttcagaccaaacgtcgggccctggagaagattgacctgaagttcattgacaccacctccaaatttggccatggtcgcttccagaccatggaggagaagaaagcatttatgggaccactcaagaaagatcgcattgccaaggaggaaggagcttgattccaggaccactttgtgcagatggtggggtctcaccaataaaatatttctactaaaaaaaaaaaaaaaaaaaaaaaaaaaaaaagacacttgaacacaactcttgagacacccacatctacccgcggggtggggacagtcagcggtgttctgttgtccttttcccatatgtcttcttccaaataactaacaaagtcactagctctagtctgtggctcatcctgaaagttgttcttgtgacatcaatgatctggcttgaggttgggggatggcaatccaatcaacttctagggcgactgatggtagccaggctgcagttgttgacaaagcagcgtgattgatttctaatcagacaaagtcctgtgagcacctgtgatgtggggagagtcacctgccccctcccctagtcaaaggtagtcacaaaggaaacttggtaagcagacgggcagtccctacccgg

SEQ ID NO: 35614 - DNA, 1199 bp, Mus musculus
attttaaaacatctgaaaaagacaaaacagaggaaaaatagattattgtaagctatggtcactgctgcagaacaccagaactgactgctttctcgctgtgttttggtgactgtgatgtagcttagaagcacaaatgtgaccttgatctcacagagatccacctctctatacgctgtaatgaagggcatgtgccacaactagccctacctccaaattattttttgatattgttaactgcatttagttgtttagttatgtgtgtgcccaagggttctcaaagcactgttcacgtgtggaactcagaggacaagctgtgagaattgtatggtccctggatcaagctcagatcaacaggcttggtggcaggggcctttacctgctaaaccatgttccagttctccaccctcaagttatcacacacacacacacacacacacacacacacacacacacgcacacacacacacacacaccccatcatcatattggcctatatggcctatatagagtttgaggttaaccccatccaaaaaataagattaaatcatcgtagtctcagtctgtcactgtgtatctctgtctcttccgtgtgtgtgtgtgtgtgtgtgtgtgtgtgtgtgtgtgtgtgtgtgtttattactagaaatggtacttagggcctacacatggtatacaagaacatccctagcccaaatgttattcttattttagattgatttttttttttttttttttttttttttttttttttttggttttttgagacagggtttctctgtatagccctggctgtcctggcactcactctgtagaccaggctggcctcgaactcagaaatccacctgcctctgcctcccaagtgctgggtgggattaaagacgtgtgccaccactacccggctgatttattttatatgtatgtattttgcctccatgtatatatgtccaccatatgcatgtttgatgcccacagaagccagaagagtatattagatctcctgggactagagttaaacatggttgataactaccatataaactccaccatctgaacccagatgctctggaagtggtcttaactgctgagccatctctcttagccccctgtgatggttgatatatgcttggcctagggagtgtgacaattagaaggtgtggccttgttagagtagagtaggtgtgtcactgtgggtgcaggct

SEQ ID NO: 35615 - DNA, 1218 bp, Mus musculus
tcaaatatgcagcaggttcctattttcaattagccctgcttcgtatacttaattcaaatgactagggtgttttgttaataagttattgttgaaataccaaacgtacaggaaattcagtgttggaaaaatggcttagtggttaaaagccatgcactgttctttcaaaggacccaagttacatttccagcacccacctcaggctgtttacaacctcctgtaactggcgccaggggatctgataccgttttggcctccataggcacctgtagacataaacatacgtacacacataaataaattttaaaaaatcttttttaaatgtacaaaaaaatggaaaaacaaaaaagattcgtcttccaacgtattcactctgaaaaggaatagtgtgcaggcttagagcagctaaacctccccccccccccaatgactggtctattaaggagcaatttacatcttttactgtaagtagctttcttagtgttctattgctgtgaagaaacactatgaccacggcaacttttataaaagaatgcatttaattggggctggcttaaagtttcagaggcttaatccattatcatcatggtaggcagcatggcggcgcagaggcaggcatggtgctggagaagctgagagctctgcgttatgatgttatgatctgaaggcagcagggaaagaactggggttgactttttttattatttctttatttattatatttaaatacactgtagctgtcttcagacacttcagaagagggagtcagatcttgttatggaagattgtgagctaccatgtggttgctgggatttgaactcaggacctttggaagaatagtcactgctcttaaccactgagccatctctccagccctgggcttgacttttgaaacctcaaatggacacagagttacacacttccttcaacaaggccacacctccttatccttctaatcctatcaaagacttctactccctgatggctaagcattcaaatatatgcttatatttgaatataatgaaatatatggggtcattcaaataagagtaataggctaaaaatggtcagaaattactgaaaccagacttttttcctactcacgttcctaccttcacaggcattttaagttaacagcctgtattaaagcaaatatactatctgcatcaaggcccagaaacctggacctaaaggtgtcctgagatggatgaggagaaagcc

SEQ ID NO: 35616 - DNA, 3389 bp, Mus musculus
atgagaacgtatttctcagtattgtttaaggtaactatcagtgcttataccaacatgacttttccaccccttgcagcagtcgatttagtggagggtttggtgccagagactaccgacagagtagcggtgccagcagttccagcttcagcagcagccgtgcaagcagcagtcgaagtggtggaggtggccatggcggcagtcgaggatttggtggaggtagtttgttttaaacataagaccatttgtggaagttcaatacataacttttgaaagaaaaagcagcaatcttgatgacttaataatttgtttttttaatctttccctaggtggctacggaggcttttacaacagtgatggatatggagggaattataactcccagggggttgactggtggggtaactgagcctgctctgtagtaggtcaccctgccaaacaagctaatatggaaaccacatgtaacttagccagactataccttgtgtagcttcaagaactcgcagtacattaccagctgtgattctccactgaaattttttttttaagggagctcaaggtcacaagtaaagatgaaaggaacaatcagcagccctgtctgaaggtggtttgaagacttcattgctgtagtttggattaacgcccctcccgcctacccctatcccaaactgcatttataattttgtgactgaggatcatttgtttgttaatgtactgtgcctttaactttagacaactttttattttgatgtcctgttggctcagtaatgctcaagattccaattgtttttgacaaaataaatttactgaacttgggctaaaatcaaaccttggcacacaggtgtgatacaacttaacaggaatcatcgattcatccataaataatataaggaaaaactcaagtggtagcctgtcttaaggcttttgatacttgcagattggggaaaaacaaacaacaaacgtcttgaagcatattaatggaattagtttctaatgtggcaaactgtattaagttaaaagttctgatttgctcactctatcctggataggtatttagaacctgataatagtctttaaacaagccattccagtcatgatgaggtgatgtatggatacatgcatacattcaaagcactgttctcaaagttaatgcaagtaaatacagcaattcctctttcaatgtttaggcagatcgttaactatgagctagccaaatgtgggcatgttattacagggaaagtttaaaggtctgataacttgaaataggtttaggagaattcatctacttagactttttaaatgcctgccataaaaaattgaaatggtagaatggctgaccacagcaatgaccagccctcacctagggctctggatgatttttggtctaataacgcatgctagtgttgatgttttttggtcaagatgggaatgaacaggaagaattatgcagcaggctttattttaaatgccgattcacattactctgttcaagctgcgttgagatgttaaactggcttactatagactttgtaaaaaaaaaaaaaacaaaacaaatggctccagaagagtaacaaactgaaatctgagatcacacaggttggaaatatgtacataactgcacaaggtgtcaattctgctctacagtgcagtttagtcagttttagttgcataggtttccattgtatttatagtctgtttatgctaaatctggccaaagatgagcattgtccaccactaaaatgcctatgccactgggaattctgggttaattttgtgaccagaatgcagtgatcaaaatgttcaatctttttacagtggcataggaagatggcaaaaatttcctaaagtgcaatagattttcaagtgtattgtgccttgttctaaaacttttattaagtaggtgcacttgacagtattgaggtcatttgttatggtgctatttcaattagtctaggtttaggcccttgtacattttgcccataactttttacaaagtacttcttttattgcacattcagagaattttatatatatgtcttgtgtgcgtgtccttaaacttccaatcttattttgtctcttggagattgttgaacgcagcttgtctaggaaagggatgggactagattctaaaatttatttgggaccatgggaatgatagttgggaagaaaactttgcacacgacagatttctagatactttttgctgctagttttatgtaatatttattgaacattttgacaaatatttatttttgtaagcctaaaagtgattctttgaaagtttaaagaaacttgaccaaaagacagtacaaaaacactggcacttgaatgttgaatgtcaccgtatgcgtgaaattatatatttcggggtagtgtgagcttttaatgttaagtcataataaactcttaagtcaaattaagcagacccggcattggcggtgtagccataactttctgatgttagtaaaaacaaaattggcgacttgaaactaaatcatgccaaggttttgatacacttgtcttgagatattaacgaaacacttcaaaacactgatacaaagtgtccagattctcagatgtttgttgtgtgagttttgtttagttgtatttttttttcagtgaatgtctggcacattgcaatcctcaaacatgtggttatctttgttgtattggcatattcagtgacttgtacattcagcaatagcatttgagcaagttttatcagcaagcaatattttcagttatgtttcaaaattaagaatgggtttaaacttgctgaatgtaaagattgaccctcaagtcactgtagctttagtagttgcttattgtattagtttagatgctagcactgcatgtgctgtgcatattctggttttattaaaataaaaagttgaactgcacagtctcctttgttgttgtcaattgtggtttacttttagaggtgaaaataaagttgtgctcttgcctgagttgtcgtttgattgtccattttttaaaatgcctcttgtaggcagaatgagtgccccgtgtaaagcagtgttgggatacagtgcaattacatttttctgctagatgggtgttgaaagatacacattagtatataacgtgtatttgtagtttttcttttgaaaaggtttctgtagtcctgggatttgctgtctcaaacttgcagagaaccccttgcatctgcctccccaagtgttgggattaaaggtacgctccagtggagctagagaaagtacccaaggagctaaagggatctgcaaccctataggtggaacaacattatgaactaaccagtaccccggagctcttgactctagctgcatatgtatcaaaagatggcctagttggccatcactggaaagagaggcccattggacacgcaaact

SEQ ID NO: 35617 - DNA, 3313 bp, Mus musculus
aaacacaccatcgttttcatttcttcagggttagctggcctccatcactttgtgccttggcagaatgagttctggcctgaacagctcctcttaggcactgaacagagaaggcatttttgtgttcatactcctctcctgttttcagcatctcacccttcccaactattattacatgataccatttggtttctgtttgtagaccattctttgtcagtgcccagatggtcacaacttaccaacaagatactgtgagaataacttgtgttcggtcccacaagtaagggtggcctaacagcacaccagagacagactcaacagtgagctcttgctaggtggagggagaaaacttcaggagttgcttagggctgtgtagtgctgacctcgatcctaatcagtgcccaggccagacatcattactgcagtagtactgagcataaggcacccttttcagtggctcagtacctgctctacctcttccagtaaagcacaactaaggtgtgggaaaaaaaagaaccattcctccctctggtagaatcccttatgctccacttgctcttgagagcacatctccagaaatgctggcaaggcctgtgtgtgaccatctaccacgtccccccagacagaatgagcataggaaagtgaagccagctgaagttcaggtgagcacagactgaaaaaggtactccaggactcggggacatggggaacttctgtcctcactggccttctggagtctgagagaagagcactggtggcatccttcctgcccttatacaggtggcgaaagcctgcacctagaacccagcggctgccccagcagctcacctgctcttctccactaatacacagctctaaagcagtgtgcttatgacctacaggaaaacaatctctgaagtcagagtactatcagtacagccgtaccccgagcaatcagaggaaattgctcaaagcttcttgactgcttccatttcatcggccagaacacacacacacacacacacacacacacacacacacacactagagcaaattaccagagattgctaaatcagtagtcagctgaaatgttggaaagccagagtgcaggtcctttctgccgccccagccctactccccacaacaggagaaggagtgtttggatctcctaagttcgttgcttaaaagatgaagtgagctgattttctaatcataaagcagtaattacttctcacatgcatcgtattcctatctgaacactgaaaaggaatgtgtccctcagcttaattcatctggaagtttcccaatgtcgagataacattggaactgctttagcagcaccccatcagaggagatggcttaaaatatcagctcagaaaggcaaaagaaagagttgacctacttcttgctatttgcattcagaaggcagagtctcaggctattggtggcagaatagataaagctgcagagttccccagcaaaggaagagtggcaggaagcggtcccttccctatatctaaggcctggggcaggcaggccaagcattcctttgaagctactgttatctttttaagctttttatctgtgagttctgttttccaatcaggggtctcttcattaaggttaccagggttttggtttgtttttttttttttttttttttttttttttttttttttttgcaaaaagttaaatcaactgaaccaccctccaggaaatggggagctactcagaatggaaactgctccttaagggtgaggcagcccaaagcattctcttgtctcccactgatgggatgttcctttagcatctcaggtcagtttcttacacgggggaaaaataagcttagcttgtcacaaacgctatggagaaaatggcttgattagtgaattcttaatacaaatgtctccttggaaagaatagagggcacactgctaagcattccaaaaatcaagcccctggcatgcctcatcacttcttgtttcaggtcagcattctggtgggtagatagtggtggctgtttgtcagaactgaacacagcctgctccatctgttctcttcgcaaggatgctgatgctgaggcacactgaagcccctgaacacatctttcttgatgcctcgtttcttcctatggctttcagaagggctgcatgttcttctcatcgctgtttttatttgggggcacttgcccttttctggcccttttagaaatagggtctccctctctgtgtggtaccactggctaaggaaaccgtacttgggaggcctcatttgtaatcagctatgcctgggcactgcacacgtccatttgccttaaacttgtgggaagtctcgggttgcccagcttacagagtgaagttcagctcccacatccatccggaagtaggggaaaagaggaagcgcgtccaaccttcctatctgcacttcctgttggtgccttcaggccacagcagcagtagcagctataggcaaagagcagcaccgtctctgggacgggcatccgcaagtcttagctgttagagggatgggagagaccattcctgacttcccactgtttgtcacccgaccctccattaactcccttgaatgaacctgtgcaaatggaccaagcaaaagaaaatggaaggagatgtttgcagccacatgggagaccacattgctggccccaagcacaactccagctctgtgtatgtgcaaaaccttggcacttggctactgcttagagttcaatccattctttatagcatgtgactgagtaaggtccggggatgatgagtcttttggacccaggagagaatctcaacagagggatttgtgcttgggagtagaagtaggcattcctccacagagagtggcattgcctttatttttcatttggcagagaccaagaattggggggtaggggttgatttccagtctttgatgtcgcctgggatgtcctctgcaggcaggtggtgctgagaccacagcatcgtgttccagtgcagtgtaggtgcattgccattcagactcagttctggggtggttttgcataaagctttgccaatgtgttctttctttctgtatgtattattgcctttttataaaaggttttgaagtattgtctcagtgataaaaagagagagatgttaatggttgttgtatatttcaccgtatccgattgtaagtattcgcagggtacagcaaagccttagcttgcaagaggagctgaaggggttggaaaggttcggattctttgtaaatgtcctgcttttctttctctctgtgtgtatctatttacatgccttagcacatgccctcccatcccaacccctttgccctgtcacctgaacaacca

SEQ ID NO: 35618 - DNA, 1066 bp, Mus musculus
tgggagccacctcctacgtggaaaaagcctctttgttatcggccttgtgtcagcaggtcgtggtccctagagactacctagttgtagtgtgacctacatttataattattgtcatgtccgaatagataggaggagaaaatcaattacacactaatttaaagagacagtatcttttttaatcagttctcctaaactttaataaaatgtatctttaaatgtatgtattattcaatcctttggaatgttatatttttggaaatcatagctttttatttccaaggcccctaaaaactgcacaaaatagatgctgctttctataatctattttaataataataaacaatgattctgttaccttgactgggggtggaacactacattctttttagagtctgattttatggattggaatacctttctttcctttatttatttgaaatgattagtctagtgattacaaaacagtcataaatttttaaaggcctgttttctctctttttttaagtcctttatgtaacatgcggatactgtgatactgtctctttgaagcaccctgtaaaccttttagagatttgaagttgggtcttgactcttaatgcatgtggacagtcgcgagcgtttatgctgtcggtgtgtctgtgttggacaaaacaatctgtaattacagccaagtacattccgttcacggggcacacccaggggagtaagaataaattgctattatgactaagttgtaaacctatgcacatcccttgcatttcgggcaactttataaaacagaaaaaaaaaacctgatttttattaataataatcatgtagtgaaatgtgtttgtaattttgtctcaatttaatttgttgtaaggtgggagggggtattgctggtttcgccatttcagatctgtgttgtctaagagtattaacgttttaattaagcaaagaaatgcggatttttaatctgtatgtaattgttttaagcacccatttaaagagaatatactgtgcaatgaagaaaccagtttaggcatttgctacaaactgaattattccaaaagaataatctataaca

SEQ ID NO: 35619 - DNA, 1169 bp, Mus musculus
gcttataaccacctgtaatgagatctgatgccctcttctggtgtgtctgaagacagctacagtgtactcatatgtaataaataaataaatctttttaaaaaagttttaaaccccaaactgattagactaagaggaactgaaatgatcagaacttttatggaaattgtatcatattaactcactgcactgagtttaaaatatatataaacttttaaaaagtgttattttaaaaatcactttacagggctggagaaatggctcatctttactgctgctcttcagaggacctgggtttgattcccaacactcgtactgtggttcataactgtctgtaacgttagttccagaaaatctaatgccctccaaggacacagacatacgtgtaagcaaaatacccatacacataaaataataaaataatttaaaaacatcccctttaagggcaggtgtggtggtgagccgttaatcccagcacctgggacgaagaggcaggcagatcttcgagtttcaggccagctagggctgcaggatgagagcttatctatgtgaacagcagttgagaactttgaaggcctaagtggagaagggttccacgtgaacagcagttgagatattatctttttgttgttgttgctgttggttttctgttttttgaaaattgctttacagttctatttaccatgttaaagataaatgatattggcaaactagaattactaatatttaaaaggtgatatgcaaagaggtatgcagtttctcttcagattgctcattctggcaggaaatggaagctatattaaattatacattgagcttatttaatatatttgtctttgtatgatttctataaatcatgttgaatttttcaaagtattaaagagttggttatttgatattatagaaaaatattttataaagtataacttcctaaatctatcctaattttaaagtttgtattttagaaatctcaaataatattttaactatagaaaacaggaatgattcccttttcttccttcctcatgcactctttccttaaggcaattgtgaaattataaaccaggaatttaaaccattaagactgggcaaacaaaatttaagatgcaccatttaatctgaagcaactctgtcttccctgggtaggagaggaagatggcccttggttctga

SEQ ID NO: 35620 - DNA, 1115 bp, Mus musculus
cgcttcgcggtccccgagggtccgcacgccccggcagcgcggtcgccagccaccgcgcgaggagcagcgggcgggcgggcggcgccgggcccgggccgccctcgctcccacgccccggccccgccgcccgcgccggggcggcagccggcagaggaaaggcgctgcagtctccgggcctcacggccccagtcgagcttcctcagcaccgagggcttgcgggtcctgagtggaggacacgagcccggagccgggcactgagctcttgggcgcccccaacccagttttcagaaccctccacgctgcggccgctgtccccttcggaccatggccgacgacgacgtgctgttcgaggatgtgtacgagctatgcgaggtgatcggcaagtgagtctccacgcgagggagcgggagtgtggaaaaatgcttttcagcgatgcccggggcctcccgcacccgttccgggcctgccccctgccctctctccctcccctctgcctccctcgttctcttcaccctggagaatttttagacgtgtacctgggtttcctgccaggaatgggtctgggggcttcttagtaatgcgtggaggccaccgagccccggtcggccaccccataaggcgtggggcgggctccctgcattttatctgacggttacacagggacgtggcaggaccgattttgtagttgcttcctgggaacagttggggtttttgttacctttcctgtaccatagacctttcacgaaaagagcagcctgcatttcatgagcttgtgtggagagagcgagagagcgcgtccggggtttttaattgtggggtgtgtgtctattgtgccaggatattagacagatgcctttgtgttcaccccatgcccggatttaagagggtcattgaagacggatgcgtccagtttcagcaaattcttcacctgccatagacaaacatagaaagagttgggggcacccaaatttttaatgcctcgttatgcaatgactgtacaatcagtgctcgaggctcccttccactgttgttgggatggtggttagcgtggtagagccgtctgctttgagtcaccgggctggtctagaatatagaactgacagtccaaatgctca

SEQ ID NO: 35621 - DNA, 1216 bp, Mus musculus
tgtctataaatagctttggtttttttgtttttgtttttttggatttttcgagacagggtttctctgtatcatctggttgtcctggaactcaatctgtatgacctggaactcagaaatccgcttgcctctgtctcccaagtgctgggattaaaggcgtgcgccaccgctgcccagctataaatagcttgtatttgacattagctgccgctctggtctcatggtgtaatggttagcacactggactttgagtccagcaatccgagttcgagtcttggtgagaccactcattgataggggtggtgtgggttcaggttttctttctttctttcttttttttttttttttcgagacagggtttctctgtgtagccctggctgtcctggaactcactctgtagaccaggctggcctcaaactcagaaatccgctgggtctgcctcccgagtgcaggattaaaggcgtgcgctaccaccgcttggcgcaggttaagattattatgtgactgatgagaacctttttttaaaagaaagttgaagccgggcggtggtggcgcacgcctttaatcccagcacttgggaggcagaggcaggtggatttctgagtttgaggccagccgggtctacagagtgagttccagggcagccaaggatacacagagaaaccctgtctcgttctattttatttatgtatgtctgtgcatttgcatatgcatttgtccgtaaaagtgagcacgtgttctgtggcgaacagtggcactgcatccttggtgctgagaactgaaccctaattctacgaaagggcggtaaatacttttaaactgctgagccatctctccagcatataaaatcttaatatgaagtactggttggtctggaaatcacagaaatttgcctgcctctgcctcctgcatgctaggattaaaggtatatactccgacatctggccagtttgcatatcctcttttaacaaaaatcttttgaatttaaaaaatatatttctaattcaccctgtataactctacatggttatgaatcttgcagtcttaattttatttttttattactcttagttatgtgtgtgtgagggaggttatgtgcgcatgagtgaattttgctgcagaggccagaggtgtgtgggatcctcctggatggagttggagtaaccttgagaaactggatatggatgctggaaatcaaactcaggaaatctggaagagc

SEQ ID NO: 35622 - DNA, 1275 bp, Mus musculus
gccacaaataggaagcacccagtagctgtttcaaggatgttttctctattttgttcccttccttccagaatggtcatgtatgcattcaacccactatgtactgggatgaaggaggcctattggaggaagaataatgtgtgtcgtctgaagacaatctccacctaaatttacaacctctgagctatgggtttcctttaggaaaacaggagggaagcccatgaatgaatctacatatcagctaatgctttatgtacctcacatatatacatgctattaaacttcaaattacttatagatacttttatgatgagtaaaagtaaaaatccaactatatactatatttaaatgatcatatcttacttattttctcaatcaatgtgtacaaaaagatcaaccttcaggaatagtttccttaaaagtttagaatttaaagaggggattctatataaaaatggctgctctattcttcccaatgtttttagtaaatctgctctgaaatctcccccacatatgacttcttaaaatcccctgatgattgctcgtcggccttttggctaagatcaagtgtagtatctgttcttatcaatttaatatctgatacttcctctatctgaggacaatgtattaaatggatttttggaagtaggagttggaataggagcttgctccgtccattccacgcatcgacctggtattgcagtacctccaggaacggtgcaccccctccggggaataagagtggtttgaaaagtagacttctgcagcttttcttttgtctgcggttcttgcttcactattactcttagtctgtttctatcgttgctcactctctctgtctgaaatgactggcccctgtcactattttctgaggtaggctgttgttgtactcttagtcagtcactctagaactctgattagtttctttaaatctcttaataaacagaatcttactccagactcactgcaagaacaagttaaagaactatcaacttcacacatagacaaacaaacaaacaaacaaacaaaaacaaacaaaaaaaatcccctgatgaagaattcttcatggccaaggaaaaggcatgccattatgtgttgaattgttcatcatttattaaattgaatcaacactagcacttggcagttgtagatcgaccaacaatagattttcacagctttcctgctaacccgttgactgagagcatcgtggtgtgacgggtggaggctggaatcatttggaaagaataaccttgtccactatagtaagatatcttttcc

SEQ ID NO: 35623 - DNA, 1164 bp, Mus musculus
ttagcctctgcttttactatagatgcaactgtcttagcatagaaatacatactactacagataggctttgtttcttttaactatagcaagaatttctattaatgatctgtgttcatctgtttaggatgttccagctcttgaaattacccacaccttcttagagaggaacctgccttccgtgcctggtctgctcaagatcactggtttttccacttctgtggctcttctctgctttgtattgtacaagtttaaacagccccagtcctgaagttttcacccacaggcctcctgcttgatcatccttagcacaatgagcatgtaaaggaaagtgaggatgaattacagcctgtggtttgggcaatttaagtgcacttgatttaaccctgctcagtttaatttcagtctttgtaaagtggtaacagtccaaagaatcacctagctaatttccataagaatgagtttcatcttgtttgttagactaatttgtgttggttgatagaataaaatgttgagtgcttaatttcaaaaagttaagtgcttatgaggaataatttctggattctgtttttttttttcttttgcctttaatgcaaaacagctaatggtttcagaaataaaataacttgacttactgtgacttttgtgtagcatccaatgtgtacagaggaaaatagtggctgaaatgttccctaggtatcctcactgattactagttccatgtgacgcacactacaataggcacttccttttctggactgtatctagacaagcattgctccttgtcagtaacattctgtgctgatttaaggaaagtagcattattttaatgtgttctatggctgtctgatcatagaattagatttctaagcctacctgtgtcttcaaaatggttaaatatttgtcttggttgatagtataccattttctctcaagtgccaaaggacatatgaaattttctctgttgttacagtcaaacacagaatgaaattagggctctgtgtgataacatgacctcttttaattattaggttttataacagacattaaattgaatgattttatatatctgtactgggttctatatcttagtagagttgtgggtccagaatggtgcctgtatttttttctttcccatctgaaatcctgtcaattaaaaaaaaaaat

SEQ ID NO: 35624 - DNA, 1169 bp, Mus musculus
tattaatatctaattcagtgtaatatttgtagcatcattatgagtatttttattgacactttgatttttaggcaacagactttatcaagcagaacattgtgatatccagcggcttcgtgggaggctttttgctaggcctggcatcttaaggacttgaaggctctatggtagtggatccaacaatgagaggaagactgtggcagcagggttatctcttaatggcacatgctaccagtctccaaagtaaggaacagccggctggacgattgcaaatgaagcagcttagcattttgccgcctgaagcttaccaagctagtatctcctgtaagacaacctatgtgctgtgtacacaatagtattcttgagcaaccatggattttgcaaatttttaaatttaacatttgtttagaaactagcctatgattatcatcactggatatagtggagacagaaaaagctgttacatgtactgtccaatgaaatattaccctatctacttttcaaagttttttgtgctttactgtctagtgctaataattaaatattgtcttatagcttcaatgttatggctgattttttttaaagatgtgtttgcaataaactgaagaattgttttacccctttgtggaaggcaacaatagaattattaagatattaaactcttctgatatgtcaatctttagttaggtttttcccccttctctttcttactttgcttatgtgtaatatttacattaaaggaggattttgtaatgaaatactacgcgactaaaacactttccctttctctaatgtctgcagtttttgaaacgtctccttgtacgttctaatttttcaagtttgtttgctttaacagaactaatttgggagtatgtcattagttggtcattgatatgctttattaatttcaaatgcatctcattttttatttctaaaaatcctaattatttttttgtctcttcaccaaaaggtacagattgctttaaaatacttaatagtataatatgaacttattgtctgaagaactgtgattttctgtgtagtcctaaaattatagcttaaatataattgcttccttgattatatgatgtaagcactagggctctcaggcattgctagcgttccatttcttgaacattaggccagtttacttgtttctctgggccagc

SEQ ID NO: 35625 - DNA, 1240 bp, Mus musculus
atgaagctgttgcctatggtgcatctgtccaggcagccattctatctggagacaagtctaagaatgttcaagatttgctgctcttggatgtcactcctctttcccttggtattgaaactgctggtggagtcatgattgtcctgatcaggtgcaataccactatgccaccaagcagacacaggctttcaccacctactctgacaaccagccaggtatatgaaggtgaaagggccatgaccaaggacaatgaccttcttggaaagtttaagctcacaggcatacctccagcaatccttggggttccacaaattgaggttacttttgacatggatgccaatggcatcctcaatgtttctgctgtagataagagcatgggaaaggagaacaagataacaatcagtaatgacaagggttgattgagtaaggaggatactgagtcttctaagaaggtaagaagtacaaagctgaggatgagaagcagacagataagttctcctccaagaattcactggagttttatgccttcaacttgaaagaaactctggatgatgagaaacctcaaggcaagatcaatgatgaggacaaacagaagattcttgacaaatgcaatgaaatcatcaactggctggataagaaccagactgcagagaaggaagaatttgagcatcagcagaaagaactggagaaagtcttcaatcctaacattactaagctataccagagtgctggtggcatgcctaaaggaatgcctggtggcctccctggtagagcttccctatccagtggtgcttcttcaggccccaccattggagaggtagattaagtcagtccaagaagagggtgtagcattgttccacaggggcccaaaacaagtaacatggaatgaaaaaaaaaactatttacactgtcaacaggacaaaatggcaaccaacagatccttaccaatcctacatctgatagagggctattatacaatatatacaaagaactcaagaagttaggctccacagaactaaataactctaccaaaaaatggagaacagctcttgatctcttgccttcctgctcttggtctgttctcttatccatttccctctctccccattcctctcccccttccctctccacattctcatggctggcctctaattctcttcccttctcttctcttctcttcccttcccttccctctccctctccctctccctctccctctccctctccctctccctctccctct

SEQ ID NO: 35626 - DNA, 1142 bp, Mus musculus
ggatgaaggccctgctgggcaaggtaaggcaaaccgcgggccggagcgcggacgcggtctctcgagccagaggcgcgctcgcctggggcaccggggccgggtcaccactcattgtggcctcgaaagacggccgaggggcttccggaaaactatttcctgctactgcgctcccctccaccccctgatacctcgcttgctctcttgagagatcacttctcttggagccagaggacagaggcagtggcgcttttggggccaagctcatgtggggcttccaaattgactacgattttaccgcccttggaggctaggcggatgatctctgaggtgcctagggagggtcatgagttcgtaaacagctgtagatttccttaaatcccccgctcgttatcttccctggttattaaggctctttaggcagtctgttcctgatgcctgctttagtcaaacatttcgggatggcttcttgtctctgctccctgaagggggaagttgcacgtagtttaggtccgtaaagagtttgcatggggttattgacttgtatcatcatcggtgtgtgctttacctgaagttaggtgatttgtttactttttggatctttctgccaaagatctaccacagttgtatgagtgcgttttctggagcttggtttcctgtgagtctgtcaggagcagttggggaggattctgggtgtagtctcttgtttatttgtgtgcaaagttgttggtactgtcatttagttaagtaatggctgcttctgtccgcccaagatggcgggacagggtgggaggagaaagtgagccgggggaggtttgggggagggaggagaggtaaacagggaaataaatagtatcagagaagaataggcctctcctttggagtatgtagctcagtagttaataaaaatgatcacagattatttgcatgtagaatttttgtccccttctctagctttgaaatagcgtgcatacgcctggtaaatgcttatcaacctgtagcacatttagttacccatggtaagctattgaacaaaggctggagtctcagtctgtctacttcagtttatatttcctgaccaaagtgtgattggaatggtaggaggaggtttttttgttagctgggactctcaaacttggagtgtc

SEQ ID NO: 35627 - DNA, 1189 bp, Mus musculus
tcctggatgtgtgcttatagagttaaatgggtgatccaaagtaggaaagatagacaaaatgaaggcaaatatatcaagcttttatcctgctttcgttatcatataaattcaagtgagaaatcactgcaaaaaaaaaaaaaatcacagcaaaggcgagtgcttataaatacctactatagtaatgcttcttaagactttcctaaggtgaaacataattgtgacttataattattctccttcttttagcattatctgcataccagaggtactacagtttacagtctgattactggaaggttggtacacattttcatgcttatttcttatttgtttttgttggcacatttattgttggttataaaaaataaagattagagctcacttttttttaatgttacttctacaagaaagagatttgaagacggaaatcaatatcattttgttattttctatttaactactttgtattttattaaaaagaattagattgttgacattttattgaccagagatgatctgatcgcatgtgaaataattgaaaaatcaaacacagccaaacagctttcagctagcaagggcttgggttaatggtttgtgtggtgctggggattgaacccagggacttatacttggtagacaagcacctcacaactgggttacatttcacccctttgtttatgtatttgtttcccggctaagaattttgaagtcactatatattcttgatatttatcattagtgtagctctggctgtcatggaacttattctgtagaccaggctggccttgaattcagaggtctttgctgctcttgcttccccagtgctaagtgagattaaagatgtacaccaccgccacctggcttgtattgtcacttttactgattgattccgttcctttgaaaaagctttttagttttatgaaaacctatttgccttttctggactttattttcctgtgcattatttctgaagtcattgcctatactaatgacattgtttctcctgacttttatttttcctagtagcttcatagtttcaggtctcaaatttatttctgtttaattttgagttaagtttttttacaaggttggagataatagtccaattttaatcccttgcatagtttaccagaatcaatgtgttaatgaggttgccctttcttcgttaatactcttggttcttcgtaag

SEQ ID NO: 35628 - DNA, 1197 bp, Mus musculus
tcacctcctccctaccttcactccctccttcatacacataagggaactctaagttccctgagttgatcttggaaattgagaaccttttgtctcagcttcctaagtagctgggatggcagtccttccctactagacccaccttagaattaagagtttgaggttccttgaagaactatgaattccagaatttttcataagtttcagctgctttttttttcttttagtaattagtaactagatgtttccttaacgtgaaatttatttctgcttttcgtaggtagcttgccatattaataaatagtttcttgtgtttgaagttggcatcagatcagagatccatgattattcatctttacatgctgatatgctgattctctcctctgtggactacacacattgaatttatatgcttttcatttgttccctgcagatgagacaaacaggagttgcacaggtacggcctactggaattcttaatgggccaacagttgactcatcactgcctacaaactcagtttctggccagcagccacagcttcctctgaccagaatgcctagtgtctctcagcctggagtccacactgcctgtcctaggcagactttggccaatggacccttttctgcaggccatgttccctgtagcacatcaagaacactgggaagtacagacactgttttgataggcaataatcatgtaacaggaagtggaagtaatggaaacgtgccttacctgcagcgaaacgcacccactctacctcataaccgcacaaacctgaccagcagcacagaggagccgtggaaaaaccaactatctaactccactcaggtaacaagactagctgcttaggttgacttctcacacagtagttcgtgtttattttgtttatgtatggtaagtgtttgaacaattgtttttatatgaatcatatagtcctacaatgttgttgctgtgtttcaattcagtatacatgtatatactttctgtcctggataatttccgcagatagacaatctggaagatttaccaatgaagaaaacaaacaatattttttaaaccccaagacgatttctaacttatactggccccagaagcaaaatgcctaattttatagtagtagtagatagtggtcaacatctgagtatagacagaatgagtcgaagagaataaaatgccaaaatggagtatgggagtgaaga

SEQ ID NO: 35629 - DNA, 1278 bp, Mus musculus
tacaaaaggtggccaggtgggagatcttaagggaaattgtactgtttcgttgtgtaacaaggctgttgaactttaacagagaataatttccgccagtttcataaagcaacatatatatttgcagctgtgaatcaaggagcacaactaacaaatgagcataccaaaatagtctgccttgcttttatttccaggctcctccattaccatccgcctcatcttgatattgttccatggacattaaacatgagaccttttctgctattcagaaagtaacccagttctgcaccactgctatttgtagctatctcgtaaggctgctggctgaaaactgtgtctatgcaaccttccaagtgtggagtgtcaaccaactggacgggagagtactgctcctatgccaggactctcgtaaagctaattagctgaacttcagagaaaaaaaaaagaataataattaccacgttttgtatatatctgacaaaactggcaacatcataaagactactgacttgaagacaacctcttttatatttctcgatttctgggctaatgaatttgttttcacctatcttttccctttcagaattttattcgggggggaaaataactagcctagctggtcatttctttgtaaggtagttagcaatatttagtctttctttggtcacctttttttttttaatgtgaaaagttaagtaagaaactttttttactgcttttatgaatttctgtcttgttttgaaactatgatcgttataattttggttcccaaataaaacatttaaaaaaaataattaacagcaacgtcacaaagataatggattgcacatagactaagaaataaacttcagaattgtgattttttttgtttctaatcttgatgtaaatttacactatttataaatacatatttattgcctgaaaatatttgtgaatggaatgctgttattttttccagatttacctgccattgaaattttaaggagttctgtaatttcaaacactactcctattacattttctatgtgtaaataaaactgcttagccttgtacagaaacttttattaaaattgtttaatgtttaaagagttttctattgtttgagttttaaaaagaatttatgtacagtgcccaatttttgttcacttttcaaatctgattatatatattttatatatacttatgtctgtatatataatatatatagaaatctagatatatgtataaagatttagaatttgaatttttcttgttttaagtttcacatctatggtagatttt

SEQ ID NO: 35630 - DNA, 1173 bp, Mus musculus
ttcccctttttgttggctgtacctttcagaatcaagagccactgagagaagatgactctgatttcatcctaacggaaggtgacctcaccttgacctatggggatagcaccgtgacagcaaatggctcctcaagctcctacacagcctccacaagtctcgagtgtggtcggagaacaaaaagcagctctgaggaagtacttgagcgagacctgggaatgggagaccagaaggtttccagccggggaacccccctcgtgtttccactgcaggaaaatgcatgacttacctgtaaatcctgagggatcagggaggctcttataagggtgaggatggccaaatgcccaagtgtgtttgatgtgttgtattgaccatgttaagactattgcttctgtttcagtggggcctgaaactatcttaccactcaaaacttaactcaagactcagatggtaaagctgaagtgtctctaaattaaacacaaatgcagacctattcccactttttcacatagtagtacactatttcagagttaaacaaaacaacagcatgctttactggtctctctcttcatcctcctgtagtatctgagcatggtggggcagataaggggcttcatcgctatgctatagtgccagtctagctggctcaagaaacatcaaattgggaggacaagttagacaaatgacagtgaagaaaagaaactgagatcagaattccagtggtgccagatgctggtgttgcaccagatgctggagcctctggctctgaagacttacatagctacatcttcctgtcacagtcttgcctgttcaagttgtgttgctcctagactgaggattaggaagcaggcccataggctgggaccttaggtcagtgggagagtactagagcctacagctcaccagatcctgggactgcaaaaattgtgtgtgtgcacaggggttttccaagagcatttcaatatgggagttggggaaagtctagttccttctcttagaatctctataaaagagttactgaaatgttaaaaaccaaaggcaaaacacgttctgttctgttttagttaaactgagggcagaaggtattgggaaattgctgatgataccatagcagtactcacttgacttttgaggttaccatgtgagcccactgcctagaaggtaacatacggacta

SEQ ID NO: 35631 - DNA, 1202 bp, Mus musculus
aaaaaagcatacttaaagttgaaatggttaaaacaggggctggagagatggctcagtggttaagagcacctacttctcttccgaaggtcctgagttcaaatcccagcaaccacatggtggctcacaaccatccgtaatgagatctgacgccctcttctgatgcgtctgaagacagctacagtgtacttatatataataataaataatcttaaaaaaaaagaaagaaagaaatggttgaaacaggatccaagaaatacacatagcacttagtgaatgtgcccttgaactttggtttctttcccgatttcctccatcgttcttttcatttactgaaaacaaacaaacaaaaagcttcctatttcaatgagactgaggaacttaggttttagcattaacaactaactgtactggcatcccataggtacttacttagttttggtgaataatgttaacaatactcaaagttacatattttgtttctgcaggttgatccaaaagattacatgtttagtggactgaaggatgaaacagtaggtcgcttacctggaaaagtggcaggacaacaatttgtcattcaagactgtgagaactgtaacatctatatttttgaccactcagctactattaccattgatgactgcactaactgtgtaatttttttgggaccagtgaaaggcagtgtctttttccgaaattgtagagattgcaagtgcacattggcttgccagcaatttcgtgtgagagactgtagaaagttggaagtctttttgtgctgtgctactcaacccattattgaatcttccacaaacatcaagtttggctgttttcaatggtactaccctgaattagcagcccaattcaaagatgcaggcctcagtatcttcaataacatttggagtcatgttcatgattttacacctgtgtcaggagagctcaactggagccttcttccagaaaatgccgtggttcaagactatgttcctatcccaatgactgaagaattcaaagctgtgcgaatttccacagaagccaatagaagcattgttcctgtgtcccggggtcagagacagaagtacagtgatgaatcatgtcttgtggtattatttgccgatgattatacaactgcaaatgccaggaaactaattgatgaggtaaggagaaagagaggagaaatagacatagctaggactatgctactttgg

SEQ ID NO: 35632 - DNA, 1170 bp, Mus musculus
acgagagagccttgattggctatgggaatgatatggaacagactaggtagatcttaaaccaggagtttgaaatgatagttatttcattttcttaggtatgaaatcatattgcggttaggtaggctatgaatgtggagtatcattgtgtcagcaaaagaaaaacaaagcatgggtgtgtaggggcccgaaaaatgactcagtgagtaaaagcacttgccaccaagcttgatgacttgagttcagctcctgggtccctcccacatggaagaaggagagaactgacttccataagcgtgccttgccatgagcacctacacacacccacatctacataaataaataaataaacacataaatgtaaaataataaaaatctctgtggccaaaatttgactcttagtaactatagttaaagataagatggatttttttttttttttttttttttttttgagacagggtttctctgtgtagccctggctgtcctggaactcactccgcagaccaggctggccttgaataataagatgaatatgtatgctgttctttccatgtttttagaatgtgtgatttttttttttcaaaataagaattggaagggttggagtaatggctcaatggttaagagaagtggctattcttccagaggacccacgttctagtttcacgtggtgtttgacaattggctataatttcagttcccgccattctgatgcactcttctgggttcctcagaccctgcatgatccacaggcatacatgcaggcaaaacacccatacatacaaataataaataaaacctttttttaaaaaagtatccattttattctcaaaacccttaaaatttttgagaaaaatccaagctgcccagtagtgacttcatatggaccagcaagcagactcagtgctaatattccaaaaggttggactgggccctcttttaaagtgaccaatagtcattctcaggcaggatttctcaactttggcatcattgacatcttgagtcaggtaattctttgtcctggataggactggcctgtgtgtgataaaatgctgaacagaactctggctcctgtccactagatactaatttcttcagttgtagcaacaacaacaaaatatttttaggcattgcctaatgtcctttaaggagcagaattgctgtcagttg

SEQ ID NO: 35633 - DNA, 3085 bp, Mus musculus
ttatatacagacagtttgataatatccttacatatgttagtcatttagcaattagtaatttttactaatgctataattgttaaaagctatttttaaataactctttgaataccatattatttacttgagtatctaaaataattcatttaaattgagtagttttaatcataaactatttaacttgcttcagtaagcttgcagttttatttcttttcatacaatagtcttattaggaaataatcatgattttattcctaattaaaagttctttcatatctctggtaatttaaactttccaacttaccttagtgctctatgataattcatttaagaatatattttgtttcttattttctcttttaatttagaggcatttgttactaggtgaaattaaataaacctatgcactttaaaaaaatacatacatagccagttaaataatcatttccttcttgcattatatgactaatgagattttgtacatggagttgacatactattttgtaaattgggagatttttttaaaatgggtatttgaaagctgaatgtggtcatggcatatgtagtcccaggctacttgggatgcctaagtggaagaatcacttgagttcaggagttcaagaacagctttggcaagtaagaaaaggctaagataaccagctttgcaaatacttctaactgatcctggcattgctggtttaaggactacttccaagtagtacagctgatttctaagcacaactgccagatgattctcctgttttctaataagaaaaagttagatacaacataaaactatagaacaccaatgaccaagcagggcgtggtggcacacgcctttaatgccagcactggggaggcagaggcaggctgatttctgagtttgaggccagcctggtctacagagtgagttccaggacagccagggctatacagagaaaccctgtctcgaaaaacaaaacaaaacaaaagaacaccaatgagcaacagatttgacagaggtgatcagtgtctgtgactagctattgtgactagcaagagacctagagcaaatcttataagtaaggaatcttttaagtaaggaacacttaggtatgatgataatctagacaggttattcaaaatctccatccattttttttttttgctcatgtcaactagtgttaaagtatgataaaagttttggttacttgaaatcattatttctcaattctatttgataatagtaacttccaggaggaggaatgggaattgttcagaaatacacattgatggatccagtctaaaggtgcacagattcagttttcaagggaaactgaaatagggtgtattgttatctaaactaatcagttctgaaagtgctgatagggcgattttatcatatttggcagggagcaagaacagctttcataggctcatttataggactcaaaatggaaacttttatttttataaaactgagattgaaaatggccacttgtaaaaattccttccatggttgttaccaaaagtgtattttcctgtttaaagtggttttggaaactttcaggccaacttataactatcatgttgaattgtaaatgtgtagaaataatgcttttttattttgaattaataatattgagtacctacactgtgcctagcctaccatcagcatttcaacatttcttttattataagagcatcatgttctacagagtcaatatgatctcataaggtgcaaataaaaactgctggcagggcaggtataataatttctatcatagtttacaaatggtctttgcaaatagtgatcagaggcattaacgtttccctgagctaagctaaattaaatgcattcttttctgccttgattatattactaattttctttacccacatttgaaataatctcaatacttgctatttcaaaactaaaatgcaatgttatagggggtatacattgagtttttaatcgtatcaataatggtgtgtaaaaactcaagaatattatataaaggagacattaatttaagattttcccaccaaatttagtatgttaaccaaaacctaaaactttatatccatttagatgggaactttttacaagtacttttatgttgtttctgcaagtctagacttcaatagtaatcatgatatactaactatattttatttctgaatagttttttaaattcatgaaaaattaatagccatgaaaactgattttattgtcatatttgtttaagcatcttattagtttacttctcttgcattaatagtactgctatattttgggtctgtatatttatatgtggcatttataaaattatctagtgttttaaaaatactttgaaataaatattaaaattaaaatggttcaatgctacttttttgaagagtactctatatttactcatacttgtaccaaaatttgataaaatttttattttcttttgggtgttttgttatacaacttttaattttaaaaacaaaataaagtggtctaatctctgttttatactaatgagaaatgaactgttaaactgcgtgtgtatgtatttgatgtatatatgtgcatgtgtatatacacaaggtactctaaagaaatgaaaaggaagaaacatattttgatataaggaatttacatcatgttttctttgctaaaataagtcacattttgttatgggtgaatatttgctaagattaggcatctttccttccatattttaaaaatatgctgggtatagcatatacaattgtaattctagtactcaggaattcaaggccagcctaggttatatattgaattccaggccagtctgggctatatagcaagagcctgcctcaaaaaataaagaagtgtgataaattttcattcaggcttataaaagtagatggtattttttattgtcaagtttaccagtctttgtcctcctttcctatctcacaaaacaaatactgaaagtgcaaattggtttgtttgtaaaaagataacattatgtttatttctacttataaaggttcaacaagtacattaagaacatttggagcattgagaacaagcagaaatgataacacaataataaaattgcttcctgttgga

SEQ ID NO: 35634 - DNA, 1215 bp, Mus musculus
atgaaaaacaaaataggtagaaactggttgcacaacctcgttgcctagtgcacctaaccagaatcttctttcccagagtgcttctcttaaataccttgcctgcagccatttctcctcagcctggagggtggagagtgggggtggagagcagagcacagcagagtccacttgaacaaagcattgtattttacttagtttaatatttctataacatctgtaatggtaggaatatagagcctagcctttgtaccctttaaatagtgtggctcttacatattatctgatgattctggataagtaaaaatagatttttttctttttttgtttaaccttaagagtgttctacttccataactaacattttctttttttattttagatgagctctgacttcaaatacttgagttattagaggataaactctcccgtcaaggattacagaagttgggagggggatgctgttcatattcaattgaagagtgcccaattcatattaagctctcgacattagttaccatcattgtcacctttctttcacatgtgttctgtacacctctgttcactagagaagagctcttattccaatactgttgctttaaaatactttaaaatacaatattattcctcacaattttttcagttagcaactaatacaggttacagtgttctaactccaggatccacactctttcttcttttctgaatcaagccatggcactgggatatgaatcttggtcatgggcagttcaaaaggaagtacccaggaatgacttggaggctgttttcaggacacacaagcttttggaacatttgcgaaccactttctggcctgtagaggagattctcagtatcatcacacctaataatgcaggggcagttatcatacccgagtgataagagttagtaaaagctaaagtacaaggatgttgaagacttatagattttgtatggccatctcctttttatactgcttattttatccctttcttatgttctaccaaccataacaaatgttctctaagcgatacaaagccatctcctgtttttttttttaactttgaagtttagctgaaactaatcatatttttgagggtgttgagggaatcaggaactatcaggtgtttatggaaacgtgacattagagagctcttagaagctttgatcatggatgcagagaggaaggctaaaaatgaggttgaatattatcatgggaca

SEQ ID NO: 35635 - DNA, 2902 bp, Mus musculus
ctagcatggaacatttcagcaggtccttcaaggaggccaccaatacatgggtgaagcctactgaggacctccagtactgtgttaagccaactaagaatgtgagctctaaggagcagttgtggggtagacagcttctcaggcgtcccacaggaagagcttcatatcaggaaactgatggctattgccctgatttggagcccagtgattcagaagcagaaggggaggggagtaaagaaacaccaagggtaaagagagagagttctgacagagaaaatccttcccatgattctgctcgggagtgccatgggaaaaccaagacacaccctcattcccacagctcaatgcaaaggtgatcagaaacgcctaagagtaacccagcctttgccccgtatactgggggaaatataaacaccaaaaggattctagtatatattagggggaattgcagggaaaatgatggtttgaagtttttgaaagcatttcaggtctagtttttataagcacattacaagagttgcagattgtctggggttgctttgtcggaggctgctgggaacagttgggcccagagtatttgctcagttagtacttcagggcagctttcccgttacattaacacactgattaatctacatactaagaatccttgcattgtcaatggatttgcaagaggatgtgacagacactaaaactacttatcttttgaaactataacatgtgactccttgaagctcaaatctagaaaatttctaattccactggtatctgtaaaaccttcaagagagagaccaggagagcaacagtctcagatactgactcttactgttgtcttccttgcttcatgcaaggttgagtttctttcacagtatcctatcttccaaagtcagttcttgtaggtgtccagtgcctgttcctagacctacttcttggggacacattcataactctcttatccagctaacaagctaacttgtgaatagtgtttacaaaagtacagaagtactacttccaaggaaaatgctctgcttctcaaggcatttgtgaagatgtccagaacatttcccaaagtgtgaccttttctggtatatttgtaccaggtcagggtttttttctgttgttttcaaataagtttgagtaaagtttggctgacagtttttgtatacctgctttaatgtttataaaatttttattgaggaataattaagatatagtgtaatacacagaggcttaagtattcttaacgtgctttaattttgaaacagatttttattgtcagaaatttgaaagcatgtgttcagcacatggatataatttagctttttatgaattttaaatccaaggccatttcccaagcataaaagttggagccatttttcagaacttgcttataccacattaccaaataatcagccttgattcatttctagacgaagagaattttgaagcaggggataaaacaagtctgcttcccctttaagcaaaaggagaaagtaacagtttataaacatgtgtgaggcagactgtaattctcagcttccttttcttcttagccttaaaataatattctctttcttctagttcgggaacatatagagagaattttcaaacaagaggccattttcaatttctgaagtttcatgctagtgaaagaagccagctgcagtaggtgccagtgctatggagctagaaaactcagcagtttgcctctgcttcactttcattcctagaacctcattaaaggtttctttggggttttgttttctcctgttttgaaattttgtgtattttgcctctcttttggctgcatcttcaaaataattccttttgtgcctatgaacatgtgtgaacagaccataacatgaataataggtgtcctgtattttcttttagttgaaaacatgagggagagaatttcctttcttcataccctcagcttctgtgcttatttgaatactcatagggtacatataaatttaacactttcatggtaatgagtataatgaagctgagttgtaaattccttaaaggccaacaggttgcctgtgtcctttcatgcttttgaattctgaggcaggggagcaaacatggaaacagtgctttagccaaattccatatgtaatgccattggaagagtattgcctgaaaaattcaagtcagggagataaaatggtaacttttttagagaattttcctgggtaaacaaatgagccagccttccattgtatacattccaaatgccccaagcatctgctacattttgttctttgaagtattacctcttaacctttgttaatgttttttgtcttgtcttataaaagttttgaagatgaactcaatcttttttcaaatgtcacctttttatcaatactttttcattaaattatgaaaactgttaacctctgtcagtgtgatgattttctattctggcataccgattttttacattgatgaatttactgtatgttaaaaatccatacaaatgaagcaaactgaagcaaggttcagggaggaagaattgaatgtttagaagcacaaatcatcacaatatggtgatgcatgtttagcaacccagtaggaagctgaaacagaaaaataatgtctaggacagcctgggttacgtgataagaccctgtctcaaagaaaaagcacacattcagaattcaagtcaataccagaagtcaaagagaaccctttgtattttgcccagaaatcatgaattcatcaggccagtaagaaaagactttagaatcatcatttaaaatagccagggacatggttcctatctaaaggctattgtttataatatttattctacacagagctctgagagtgtcttgtaatcaggtttatatggtctcatggcaggactttgtgtggtaaacattttcaagttgtcaaaggt

SEQ ID NO: 35636 - DNA, 1195 bp, Mus musculus
tggtctacaaagtgggtcccagggctatacagagaaaccttgtcctgaaaaaccaaaaaaaaaaaaaaaaaaaaaaaaaaagaaaaagaaaaaaagaaaaaaaagttggaacaatctcatactaggaacataactgtacacctgaaagctctcgaacaaaaaagagaaactacacccaaattgagtagatgacaaaaaaaaaatcaacttcagggctgaaatcaataaaaatcaaaccaaacaaccaaccaatacaaagaatcaatgaaacaaagagttgtttctttgagaaaatcagtaatattgacaagccctcatttatattaactaaaattcagagagactatttaaattaacaaaattagaaatgaaaagtggaacataacaacagatactggggaaatccaaagaatcataaggatatacttttaaaatctgtattccacaaaattggaagatttaaaagaaatggataattttctcaataggtaccacttacaaagttaaatcaagattagataaacagaggtttgttgaaggacatcggccgtggagtttggggttcggacgaagattgaagtcatggctggtgcagaaagtgatggccaattccagttcactggtattaaaaaatatttcaactcttataccctcacaggtagaatgaattgtgtcctggccacatatggaggcattgctttgctggtcttatacttcaagttaaggcctaagaaaactccagctgtgaaagcaacataaatggattttgaaatgtctgacctcacctgttaagtcccatgcctgaagaagctgatgtgaactcatcatgtaatacacaatttgtacaataaattatgaacctggaaaaaaaagattagataaacaatttaaatagaactataacccctagtgaaatagaagtataaagtctcccagctcccctcccccctcaaaaaaaaaagcccagggccagatgcttttagctcagaattctatcagactttcttttttttttttttccaaaagtcccccatatccatccacccccactcccctgcccacccactccccctttttggccctggtgttcccctgtactggggcatataaagtttgcaagtccaatgggcctctctttccagtgatggccgactaggccatcttttgatacatatgcagctagagtcaagagctc

SEQ ID NO: 35637 - DNA, 1438 bp, Mus musculus
tattattgccatttccactctactgaggatattgtgaggtttgtgtttttgaaaaggcctagtatattcaacattaacatctgattgaagatcttaaattattatagggtcctatagaataagtggacccataggaaattgccaatatccaaacatttttttaatctttataaatagcactttccaaggatgaaacttaacagacagggtgagcactcccaaacaagtacgtgaggccaattattcatttggaaagaaagtcaaaatcttggatggggagatggtgatgaattcagtggtgattagatttggaagaagagctttctaggcctcgagagcagcaaatgtcacagccctgtggtgggaaggaatttcacgtatcctaaaagtagagaaaggattttaatcagggataagagattggttagagattggagggcggattagagaccaggtcatgcaaggccaggatataactttatggagcagcaagaagccctaattgacctctccttctcctcagaaccctgactttcatggttatgatagtgaccctgtggtggacgtctggaatatgcgagctgtcttcttctttggtttttccatcgtcctggtctttgggaccaccttcgtggcttatgtgcctgattacaggtataggggttttctaagaaagttgagtgggaaggggcagaggcaaaggtagaggttggaggagtctctggccagaattcttaccctgtactggtgggggatagggtgctaaagttgggaacttctgtctagtaaggttccctcacatcataacccacttgttgcttttaggatgcaagagtgggcccgccgggaagctgagagacttgtgaaataccgagaagtcaatggccttcccatcatggaatccaactacttcgatcccagcaagatccagttaccagaagatgactgatggcttaccgagcagggcctaagaagcattactcatccgctgcttgttatttacctggttcctcagaacaccttattaaaggaattgaaagtatgactggttactgctgcttttgttatggaagaggatatatgagtgtgtgacaagctttcaagggccactgctgcctttcttgtctgttgctgtgtaccactaaggtttggtggcttagtactgtatcccatggccctgtggattgcatagcaaggatatgtggctccccttgaatctcaggtggttgctattaagtagtagctagggctaaagccatcagaagcacatctggtctgtatagtcaaggtttcaaaaaaagatgtctggcacttcagggttcagtacagtaacctgggcttcttcaagcagtggttctcaacctatctaatgctcagacccttcaatatagttccttatgttgtgctgaacccccagccataaagtcattctcattgc

SEQ ID NO: 35638 - DNA, 1223 bp, Mus musculus
ggcaagcatatgctacctccccattccctgtgagaacggcccaggagtccagaaaaaagagtagctattggctacccctaagaggcccgctctttagaagcttgctgtcctttgaagttgaaagacaactagaagctccacctctttccctacagggccatctagatgtcaccgctttcttcttacgaagaaaatgaacagacctctcaaaaacaactctctcccagactaacagaaatgataacgttgattcggtagcgacacggcgtgggaggcaaaatagagtccgcacctcgccgaactcgtaaacaaacttaggccggggatctatttagcaaggtaagggcggagcgacaaaaatcgcgctgggatcaaccgcagctgcgcacattgtatttccgtctccctccccccccccgccccccaggactccgcagtacaagctgtcatggcggcccgactgttaagcttgtatggtcgctgcctgtcagcagcgggggcgatgagagggctcccggctgctcgcgttcgctgggagtcctccagggctgtaatcgccccatccggtgtggagaaaaagcggcaacgagaaccgaccatgcagtggcaggaggacccagaacccgaggacgaaaacgtctacgcgaaggtgagagggaggggggaaaacgggacgctgtaggggccaatctggaccagggaaaccagtgtcaaagcggacattctccggcccgagatttgagcagtggacaaaatcttcgaatattcagaaattttgcctagcttgtttttctctttcgttgccttatttgcagtcagaaatcacactgaaagagggcagcacccaaagcatgttagaaactttataattagggtaatactaaactctaaggtaacacgtgcataatgccaggctgtgctagacactttgtatctatttactcatctcaattctaaagtagcgtgattttgaagtaggcactataactgttactgaagtaggcactgtaactgttacagtgacatagatgaggatactaaaacacaagttgctagcccaagatcacagcttgagtaggtcatggagctgattatttgcattcaggactgaattcctgtgctttatggagagcagagattctggagtcagacatcttgggttgaaaattattcacttgtatgaccttggacaagtaatttaatctcttggtgcctcggtttct

SEQ ID NO: 35639 - DNA, 1117 bp, Mus musculus
gggttgtcttcctgaactgttgcacggaagcacgaggaaatggaaaacaatgtccttgggttataggacagtagggaatcttgacaatgactgtctcctcaaggaggccctctctgctccaactgccttgacccctttcttccttccattctctgtagagtctctgcaggaggtatcacccagacgggcagatcatgctggcagcaacaggggtggctgagaagtgaaaggagccagctactgaggaggggccccagcagcccctaaaactcctatcaggacatggagtatgaaagacggtgagttatcccctccctcccctcccagtgtgagcactggtttaggatgaagggcgctctaggcaggagaaacaacacagcaaagaaatggactcttttcagcacatgtgcatctgtgctctgagaatgcacaggtgaatgacacaatgactgtaggtctcccctgtaagagactgtcttgctatgtatagcattacatggaagagcacatagtttacaggtgataccaaacagcctgatgagtaccatgactggacgtgaaggtggggtttttgttaatatgggtgtggaggccagagagtggtgccaggtgtccacccaattgctcctccatcttagtttttgagactgggtctttcattgaacccagagctcacagatttagctatactggctggccagcaagcctgagggagtctctttttttctacctcttcatcactgggattgaaggcatgtgctacacctggtgtttttatatggacactggataatcaagcttatgccctcatataccacaagaagtttactgattaaggcatcttccaggcctgcttttcttttttttttttttttttgtcttgagacagtttctctttatagtccatactggccaacttgtggttttcctaagacctggggtgacaggtgttccaccacacccagtttatacacaaagtgctttggtttggttttgagatggatcttgttctgttaactaagttggtctcaaaatcttgagctccagttctacttcatcttccttagtagctgagaaaacggggtgtgacatctcatggtatatatagttttgtttt

SEQ ID NO: 35640 - DNA, 1143 bp, Mus musculus
gtcgagtttagtcacttgcaggacgctacacgatggatggaagccaatcaggttgctttgccgcacttgaacccctccccccaaaacaaatactactttataatcgagcgctccccatcgcctgaatcttatggacacagttccctgccctgtgaccctgtgtcccatatccctgcccctttttcccccctcctgacccccactatttcctcttcccatctctcactacccactgggcttcccatttgtggcccagtctcaacactgacccctggcccccttcctactgccaggcactagcgctccctcacctctcctggctgagctttcagagaaagagctgccagggtgggttcccttcttagcttcccagaccccagcaggacccttttgctcccgagtcagcagagccagaacttggttgtgctctcaggaccactggaggtcctgtcactgagggaacatagatgttggcacataaactagcaacacttgttttgccagttttctcctgcatgtgaatttggccctctgagttccatgcagagggacatcactgcttttggttgaaagttccagtcaagtgtgatagttttattgacaccgtgggctcagttcactggcccctcccattcacagcaccctccccacccacaggaggccccacctctaccttctcagtaaggaactgtgctctgtcagctacggaggggccagctcccctagcctggcactgaatcccaactcaactgcgttgggaccttccaagactcaagggtctaacctggctacccagccctatcctgatgtagagtcactggtgtagagcactggaaagaagtgtcaggggaggaaggggcagccgtggtaaagtggagggtcctggcagaggcagccctgtggccggctctgtgggtctggtcaataagctagtgcggtgggcccaggacccggccaaccttgggaaggtggcctcatggcgggaaatctccgtctgttaaattggctttctttttccccttctccagcattagcgctcgtgcgctctttctctttttctctcccctcctctctcttccctgcccatctcccctcattcccagtgtagcctgtgtagtgctagccctgagtatggcctggcac

SEQ ID NO: 35641 - DNA, 1155 bp, Mus musculus
cttaccaatatgatgagacatctggctactactatgacccccagactggtctatactatgatcccaattcccaggtaagcgaaaggtagcctagggaaactggagtgtggttttgtggcagctacccctatacatcctccctcattctttccatcagtattactacaatgctcagagtcagcagtacctatactgggatggggagcggcggacctacatacctgccttggagcagtctgctgatggacataaggacacgggggcatcatcaaaggagggaaaagagaagaaagagaagcataagacaaagacagcccaacaggtgaactgccggccatcatctggttgtttgaagtctatgttctctcacctcttgctctttcctgctataggaaatggggtggtgggtgggcatggacagggataggaactacttcagatagacagtactcctgaattaggtctattttgggggttccagtactcctgaattaggtctattttgggggttctgtagcaagaccacctaccaccatgaagtggcttgtactgtctgcgtgagctcttgacagcttttctctgtcctacaaagggaaccttcatgctggtggtgggtgtgtattgatcccagagaaattgtcgtaagctcacgaggggttgagaaggaaaaaaaaaacattgcagggttttctagtagggaaaagttagcaggaaccttagtctctgtggagaaaaggtatggcattgaagcaagcaataaatattctctccgcaacctgagggattctcaaaatgtttcatgccccaggaaaaccacaagacattaacgtggcatgatatcacatgccttagttaggtttctgttgctgtgataatcgttgaccaaaagcactatgggtatgaaagtatttcatgatgaagggaagccaagggaggtacagatacgaagctacagagcaggaagagctgctgctgcaggggcagtgggtgagaaagtagagacccaagcttcaagaaccttcaacctcaaccctcaaaccccagattgccaaggacatggagcggtgggcacgcagtctcaataagcaaaaagaaaacttcaaaaacagcttccagcctattagtgctctacgagatgatgaaaggcgggaatcg

SEQ ID NO: 35642 - DNA, 1192 bp, Mus musculus
agtatggtggcatatctacagcctctgtgtaagtgcaggaccgggcaccaggcgaggggaggttgctgctggcagaccactaacactatgcactgtcccctgcagggactttgaacaacccactcgggatggattaggcagtgacaacattggcagtcgaatgctccaggccatgggctggaaagaaggcagtggtctgggccgcaagaaacagggcattgtgacacccattgaggtgagtctctataagccattcttgtccccaacactcccagtgcacctctaccagcctgaaaaaccctccttcccttacacaggcccaaacacgagttcgaggttctggcctgggtgccaggggcagttcctatggggtcacctcaacagaatcctataaggagacactgcacaagacaatggtgacccgcttcaatgaggcccagtgaacagctttgaaagcagtttctacagacatggggtatccatcgagggacagagaagatgaactgtggaatggtctaaggaaggctcttctatctaccagcctcctccccaaccagagaagccaaattagacttggagttggtgacttttgctgggaaattgggctcaaatcatgttccttttgtaataaaatctaaaaagcctgcatcttccatttctactttctcatgtcctagtatggtttcttacacaggcacagaatgcataaacagctatgaggctaagctggatagcaatggtggctataaatacctgggatattagctagcaaccccaactgtcaaggttcaggttatggcccatcccttgtcagagatctgaggtttgcttcagagcctggattgggaatctgtggtcccctatccgcacttaaccctcacttgatcttagtctagactaaactctgatttgccatcctgagctggagacggtgctttcaggcttctgtatgtaaaacacagtaggtgcttatcccctggttgtccctataccctcagcatggtgatgatctcaaagggatataggaagcttagcctgttaagttcccaggccaagaatatcttcatgagcatcattcaagttcacccttgctctcttcatccacaaatgtaaacaatagtgcttcgctctctggcctacaacctgtgattcctagttatccttccgccattggcagaggctctgaatggac

SEQ ID NO: 35643 - DNA, 1099 bp, Mus musculus
attcttgctctctgtctctagggaatggcgaagaacggcagtgaagcagacatagacgagagcctttactcccggcagctgtaagtagggcaggagtttgcctaaggtgggaaggggcactgaaagaactggatggggtgggctggaccgtgacctggagtcccctctaatttgacaggtacgttttgggccatgaggcaatgaaaatgctccagacatccagcgtccttgtctcaggcttgcggggcttgggtgtagaaattgctaagaacatcatccttggtggggtcaaggctgtcaccctacatgaccaaggaactacccagtgggctgatctctcctcccaggtatctcttcccaacatcctcaccccccaaccccccatcccccaccgcccgctgagatacctgtttctctgtgccacagccttatcctcctgcccacctgtctcttacagttttaccttcgggaggaggacattggtaaaaatcgagcggaggtatcccagccccgacttgctgaactcaacagctatgtacctgtcactgcctacactgggcctcttgtcgaggacttccttagtagcttccaggtacttggtgattgctcagcttcctgcttgattttcacagaaagaactcatgtgttgtatttttgatactattcactatttaatgtgttgtctttggcatcaagcattatgcgtgagagcagagaagatgcagacaggatgagaccttgggcctatgcagacaggatgagaccttgggcctgcctttggggaaaagatggagacagtgtcctgctatgagtgtctagctcttctagtataactttaggcaggtcacttagatcctggccttataactctttccattttcagaataggaatggcagcagtaccgacttttcatggggttcctatgaggattaagcatggagaatagcagcttggacacaggaaagatggcacaggcacttactagttaaaaagcctaggctgtgagagctgaaagtctgcctcgggggactttcaaggtaccaaggtccccaagggccaaggtactgtagcaacaatcagacagagtagtaggagctc

SEQ ID NO: 35644 - DNA, 2652 bp, Mus musculus
gcccatggagatcaaagtgctgggtgagctggggccatggaagtatcataggggaactggttaggagatttgaaagagaagagtccctgggttcagagtgatgggagctatatcctgagtgcctgaagtcgatcaaagaatctagtaagacccaccagagccagtgaacatggggaagaagggccaactgttcgattgttaataggagcatgggcccctaggatctgagttgtattttgaatggggcatcatgtctcaactgatttggggaaaagcagcctatcagtataggcctgggaccagggacatgagagtctcatgatatctgaactagctctgaagcaggggggagatagtttctgatccccagtgagaactgtagttgaaagggtatctggtgtctacattgagtcaggcatatggtttttttttcctttgtctcttgagttttgtaaactttaaggagggcatataagactgacagcctccctatctactactctaggtccttatacctttagtatctgtgacacttccaacttctctgactacatccgtggaggcatcgtcagtcaggtcaaagtaccgaaaaagattagttttgtgagtattgggggcagtagttcgtggtgggtggttctagaacagtgcttctcagccttcctaatgctgtgagcctttatttaatacagttccttgtattgtggtaaccccaaccataaaattggtttcgttgctactgttatgaaatgtagtctaagtattttgccagaggggtgtgacctatacagttccaaattctctgttcatttcttcccttttgtgctgctttcctgcagaaatccttgccagcatcactggtagagcctgactttgtgatgactgactttgccaagtattctcgccctgcccaactgcacattggcttccaagctctgcaccaattctgtgctctgcacaaccaaccacctcgaccacgaaatgaggtatgtagttgagccagcagtcagtaaggatagaaatacttggtgctaaagggccacccatacctgtgcttgtcaaccgtccatcctttgacagtagcctgattaatccttgcttgtttcctttgccctaccaggaagatgcaacagagctggtgggcctggctcaggctgtaaacgctcggtccccaccttcagtaaaacagaacagcttggatgaagaccttattcggaagctagcttatgttgctgctggggacctggcacccataaatgctttcattgggggccttgctgcccaggaagtcatgaaggtcagtggggtttcatcttgcttctattacttgctatccaaatgtgtgagggcctgagtaataccggccacttgctctttccttgtccttcactaggcctgctctggaaagtttatgcccatcatgcagtggttgtactttgatgctcttgaatgtctcccagaggacaaagaggctctgacagaggagaagtgcctcccagtatgtgaatgggctggagggaaggcaatattgggggtgtttctcggggagcttgtctctgatcctcctcacttcatgttcctcagcgtcagaaccgttacgatgggcaggtagctgtatttgggtcagactttcaggagaagctgagcaagcaaaagtacttcctggtgagtggtctcattggacacctagtgtgttcacctcccttggtctctgcccaccccttctggggttctcttctgcataataaaggaaagagtcttatctctttaacctgttacctcttggtctcatcttcagattataaaaggtcatttcttacagccctgggacttggacatgtatgtggcagtagactttattggtctatcatattgcctccagcaggcatgagaaactgtgggtggctttgtatccgcttgtatcaccctgacttgcctttgtgtctctccttggctgtttcttaggtgggtgcaggggccattggctgtgaattgctcaagaactttgccatgattgggctgggttgtggagagggtggagaggtcgtggtcacagacatggacaccattgagaaatcaaatctgaaccgacagtttctcttccggccctgggatgtcacggtgagatggatgggaataggggaatagatcatctcattttcctgtctttttcctatccacggtatttcaattagagatatacttatctttcctttgacccttttcattcccctgtttctgtcatttattcagcaaacattaaatagtcctaccttgaatcagttattttcttctcttttcttttctttctttttctctttttctttctctctctctccctccctccctcccgctccctctcgccctccctccttccctccttccctcccttcctttcttcctttctctctttcttttttagtactcgggcttgaatctaaagctaactgtatgtagcctccctgcatgctagacaggtagttacaaagactaccactgagctgccctttcatttcctttttctgttgactttttttttaaataaagatttgtttacttatttattttattttttaatgtatatgagtacactgtagctgtactgatggttgtgagccatcgtgtggttgctgggaatttgagttcaggacc

SEQ ID NO: 35645 - DNA, 1175 bp, Mus musculus
tccactatttcataaaatccatttactctgcctgcagtgggcccgggatgaatttgaaggccttttcaagcagccagcagaaaatgttaatcagtacctcacgtgagtaacttccacatcttacccttctgcttgccaccaaagacattcagctgtcatcctcaatgctaggtgcacacttttcaaaggacactaaatgtttagttctcatgctgttgggggatcaagatgaggagctttctgtggagaaagtgggattgccctggagcctagttcagtggccactctctctctctctctctctctctctctctctctctctctctctatatatatatatatatatatatatatatatatatatatatatatacatatacatatatatatacactcttgcctcttggccccctctactccctaacagagactccaaatttgtggagcggacattgcggctggctggtacccagccattggaggtgctggaggctgtgcagcgcagcctggtgttgcagcgaccacagacttggggagactgtgtgacctgggcctgccaccactggcacacccagtactgtaacaacatccggcaactgctgcacaactttcctcctgaccaggtaacatacttgtctggcaacatgggtttccttgcaaccagtttgctgcagactcttaagtagcttctcccagttaactagtccagatgtgaggcaaaagatgtcagaaaattgacctttttgttttgtccttcatttcttgaagcaagagaacttgctgttccttttcactgtgctgtagactgtgtctaacctgtgctgtagactgtgtctaacctgattttttcagggttgtagtgaaccttgaggccaagatcctcgacttgagagcaagggagtcagcatttattcaaatcccagttttctctaaacttgggcaagtcatttctctgtacctttctttagcttgaaggaggaacagttagatatgtttcacagggccttctgtgaggattcattggtatttattaatactaagtacatacctggcgatccagtctagactagcaagtaaagcaagtgttagttttctcagctaggaccttgcagtgtaggtcttagatgactgattccagccctctttgggacccagccaagggtagtgagttgggg

SEQ ID NO: 35646 - DNA, 2956 bp, Mus musculus
tttcaggtttgctctctgttctgctctgcctttccccctttgacccttgattctaggatatctctccaaaatcttatctgactaaccctttgtcgtaccctaaggttttctaccccactgtttgcatctaaagggctgtgtttttctttttgtacagatgacagccgtcttgaggagctcaaagccacattgcccagcccagacaagttacccggatttaagatgtaccccattgattttgagaaggtgcttggcaggggccctggatgggacagttggggtgagctaagcacagacggggttgtaaggaatggggatctaggactatggagccagtctaagcctttacagtgatcagatcatggactgccacatagctttccttctgatctgggacagaccagcaggtaattagcattggaggatagttatatcccaagagtccagaaaattttctcatctgatctactactcttattcaggatgatgacagcaatttccacatggatttcattgtggctgcatccaatcttcgggccgaaaactatgatatttcccctgcagaccgacacaaggtcaggagacttgaagcctgatgttctatccactctcgggcttgagtttcttatatcccatcctgttctgtagaccttcagtctcttataaatgataacattttccttggtctatttctcagagcaagctgattgcagggaagatcatcccagccattgccacaaccacagctgctgtggttggccttgtgtgtctggagctctacaaggtagttcaagggcaccaacagctcgattcctacaaaaatggtttcctgaacttggccctgcccttctttgggttttctgaacctcttgctgcacctcgtcaccaggtaggtgcccacatgcaagatagacctataataaagtgtatctcaatagaacttgctttggtttgcattagacctggtcactaggtcagagttccaatcaaaatatgcctgcatctttttttgcaagagtactaaggaaataaaagacagtagatcagagtgattgagaagatagtgggtagaagatgagaatggggttttccttgtggcatacgacctgtcattgtaaaggttcagtgtttactcagtgacatgggagccatgagaaggctttgaacaaaaaaggttatgatctaacttaactgggtctgaatgcatcagggcagggaaggcagggagggcagggacttctggaatggaccacatcctattctctttcttattgcagtactataatcaagagtggacattgtgggatcgctttgaagtacaagggctgcagcctaatggtgaggagatgaccctcaagcagttccttgattactttaaggtaaggcctgtctccctctccccttacctggaggacaagatggataaattactttttggccctcctgccatctaacactgctgattccctctcctgccttccagacagagcacaaattggagatcaccatgctgtcccagggcgtgtccatgctctattctttcttcatgccagctgctaagctcaaggaacgattggatcagccgtgagtaggctattgccaggcaggctgggaagggccctgtgttgggtggggagcctcagcttttgaagctttcactcctacccatcacctcccccgccctcacctacctccccttcctcttgctttgcctccttggccctcttcccttaccctcacccctttccctaggatgacagagattgtgagccgagtgtcaaagagaaagctgggccgccatgtgcgggcactggtgcttgagctgtgctgcaacgatgaaagcggcgaggacgtcgaggtcccttatgtccgatataccattcgctgatctccgtgcattcccctaagccccagtcctccctcctcagatcctttccaatcctggtttccatttggcctcaggcagtggtccatgtagccaagcctggccttccctattacccagcaacctcaagaccctctcaccgctgctttgtaccttgtttggaacctaaatcccaataaaaggataattacccagatgtagccatcctggctgtctccaaggaaggaagaagtatgtctagagttctctggttcaaataagtaccccaatgggctactccagctataagctttctgggcagagaaaactgggaattgatatcttttatatactctgcataacagacatgaggtaccagtgaagttatgcagaccagtacctgggtcaatatgatttaagtgacttgaactgggttcaaactctgtcttctccatgatcactactagctgcctccatccactatgaagaatacacttaacagtgatcaggtgggggctggagagacggctcagctcttaagagcactgactgctcttccaggggtcctgagttcaattcccagcaaccacatggtggctcacaaccatctgtaatggtgggtctgaagggagtgacagtatacacacatacaatcagtcaatcaatcaataaaaacagtgatcaggctgcaagtgctaagttcgcatgttttgggcattctcccttgggcagatcccttccccagtttgaagcagccagactctgggccatccttttggtcttttgagacagtctctatttagccctggctggcctggtactcactctctataccaggctggcctcaaattcacagagatctgcctgcctctgctttcaaagtgctgggactgaaggcgtgcgccaccactgccaggccaagctgacctttacagtcatagttccccacagcaccaggattgcctgtacagttatttcaagttcatgctgaggagccctgaacaacccagtctaaggaacatcaatgtcatgaggcatactgaaggtttttcttttctttttctttttttcttttttttttttttttggttt

SEQ ID NO: 35647 - DNA, 2105 bp, Mus musculus
tcttccttacttataggcagtgtgacagaagaaagtcaagcttctcaaaagaagaagcaacttgtgccatgtggggttgtacccacaggtcatcccccacttatatacctctttatttatagctacttccatatttgcactaaaggaggtacagctacaaaaggaggccaacattcggtccacttctatgcctgactcaggtaagtgtggccctcttctcttgctctatccaccttcctgcttgcccactcacagccattcactctgctttcccctgcaggcaggccagctttccgtgtggtggataccgagttctaagccaagttttaagccacagacagaccaaggccccagcaggcagcggctggagggatgccacaccccttacagggcagcccccatctgcaatcctccctgcttgttgcctgcttacctgcctgagccacactcccctgccaacttgtcccctgccacctgcccaaacaccaaaccactggcctggcctgtcaacccaaccattggcctgtctgctgggtgctaacaaagctctcaccactactttgcttgatgtgtctgtctctgtcttggtagttgctggtgaacagaatggccatgccaggtttccacactaaggctaggccttcccctctaaatcacactctctcccaggaccactaccccatggccagccagggatttggagctagcccaggccaggctcttaattgactttgactagaaggtagtgagtgatgccttgggtctgagcatcctctgcctgcttgccacctgtcccacttgcctctgttgtatgggccttcttttttgttagtttcttttattgtttttttattattttaaatgaggttctcactttttaatgcaatatctctgtatacagactggttgggcgctactccctgagtatggccctcctacagtattttgtgcaatgaagtcccactcccagcctttgagaggtagggacccagaccctattcagatcctgaccatcactataccctgggattggctatgggaaagcatgcctcagccactcaccttcctcccctacctagtgtccccagctatagggggacctgagaactaccagagactgggagatggacatggtgggggctactttttccctcctttagtcccgtagccagggcctctttccttctcagggtcttccccagcccagctctgcctagccctcctgtcctgtcctactcggtgctgttgagtaggggctctgccaggaattgaccagcttagtgaggagccatatataatatgtgcacaagcagggggacatgtgcgagcttgtgcccaattgtaacactccagtccctaggagggtaaggcaggccaaggacagtctcctggatgtatggtttgctccccttcctccaccttaagccttgggacccttaagcggggtgggagggcaagggagggtgccctcctagtggggtttggggggattgggttcctgaatgcaccataattgctgtatgaaatattaaaaaaaagtctaaagttcaaagtctggttataaatcatcaaaaaggcaagggggctcaagttatggtgattactgggaccttcatgactccatacctggtcccatcaactaagaacattgggaaagagttggctagaagtgtggtgggactgtgggagaataaagtctttggagggattgcacttggaatggtaggatgagttgaagcagtagggtagacttaattgtgtcaacgggaatcaagcacggagtatagataagttagatccatctcgaattatagacaagcctgaaaggatggagacaggaaatatttggaaggaccagtggtagatctagagtggtatgaggcagaaaggtccagtctgacactatgaagaggtcagttggagagagaatgaaaataaagtagggttttgaccacttaaaggaatctagtagacttagaaaagttcaagagtgaggtcatagagccagaagtttggattatagacaagcctgaaaggatggagacaggaaatatttggaaggaccagtggtagatctagagtggtatgaggcagaaaggtccagt

SEQ ID NO: 35648 - DNA, 1097 bp, Mus musculus
ttggtacatccaaaggatagttcaaactgaacatggcagtagactttgcagggctttttttttttttagacctctggcttctccagtacttctctttggtcctgggaatacagaggtgtacaagaaaaactagagacaacttcattttgtatgtaattgtctctacagagagacttgtatatagttttatccttacacctaaaatccagagttcttaccatggaaggcaagcaaagctaaattatctggattaatctctccttcattctaattcaaaaggcttctctgacattaatttgtagctgattgtatatctgcttacctgtggctttagagcgcaggccactgatggtgttcttaaccttttcatgcatcactgcttcaccactttccaggttcatgattaagaactgccaggtgtgttggcgcatgcctagaaacccagctacttggtcagctgtggcaggaaaagccacatatgaccagcttgagtaacttaccaaaactgtctgaagaatttttttgtttcagaaaagtgttgggagtgtagctcggagatgaagcattcacataacattttgagagagagagagacagagactgactctttcatgtgtgtttaccactaacttctccaccatacccaaataaaactttgggatggccctctatccttgtggccctcccttgggagtcttctctgctctgttacagacgatatgtgaccaaacccacctcagatgaggatgatggggatgagaaaggtgagtcgccaaggaggtgagaaggaagcgagacccaataaagatgagtgtgtcttactcagcagggctgaagggccgaggagcagcgggtttggatttggatatatgacacacacagggttcttctgtgttgaagcgcagttccctggagtacccacattttgatccttgacattatctccatcctagttgatgaagatgaggatgaggatgtggaagatgacagcagcagtgaggaggaaaaggaggaaatgtctgcgcccactgttaatgatgggacccgagaagcagagcaggagcaggctgggaccagctctggggtcactgagagat

SEQ ID NO: 35649 - DNA, 1207 bp, Mus musculus
aagttctcattatccacctgaagcgtttttcattttccaaaatttcccgggagaagctggacaccctggtgcagtttcctatccggtcaggagctttgcagagaaaggctgtgggacctgggagggtacaggtggagcccaccagtatttactgtcttctcacccacagggacctggatttctctgagtttgtcatcaaaccaaagaatgagtcttctccagacctctacaaatatgatctcatcgcagtttccaaccattatggtggcatgcgtgatggacactgtatgtaccaggctatgggctggggcatgccctggttggctggatatagactaggggtcaggatgtacccagtacatgactaggtttatgtgtcagagaaaggcaggggtagcataaagtagatttggatactctagagagccaagaaggtggtaagaatggtttctgtttatttcagatacaacatttgcctgcaacaaggacagtggccagtggcactactttgatgacaatagtgtctcacctgtgaatgagaatcagattgaggtatagcttctgtacttcttcttgccctcttttctattatccccccccctgacatccaaactgaccaatgtcctctctttgcagtccaaggcagcctatgtcttgttctatcagcgccaagatgtgggtcgacgccagtcccagacttcttcatctgacactcctgcctctcctgtctccagttctacacccaactctgacatcatggatatcaactaaggagccctagaacctaccatggagaaggaagccccctttgccactctctcctgtctaccccctctctttcctgtgtttatcgcccccctctgcccccccagacattgcaggcttagtctgtggctactgttctcttgtaccgctgtattactctctcagaaagaagaggccctatgcccctggcagtgtgcccctgcctgtgtgtgcccgtacagcagtgacttcctctcctagtcttatttatgctccccctccctcttttcctcatgccaaagtgttcttagtggctgatactggggtttacatgaacacagagtgtattttcttattgagaccataccttcttctctgtgttaagtatccataaaaagctccagattcccatgttcaacagtgtggctttgtttcttcatatgtacttactatgtaccagtca

SEQ ID NO: 35650 - DNA, 1174 bp, Mus musculus
tacatggtgttgtctgctgaggtttcccttctgtgcctctgtgggggggggggggtagggggtgggagtggggggagcagtgcgaaagcagattccttccctggtccagtgccctcacccacatagagtcaagtgatcaaatagaaaggactagcttaggaaatccctggaagtggttggtgcttgtttagttggggaggaggtgttacacatgcacatgtgtgtgatatgcactctcagtatggcccagattgtctcgaggaactcatcctactgagtagctgggactacaggtagtgcaaccatgcttgccacagtgccagtttagtgtcttttttttttcacaacgatgtattgggcaccaaattgtgcctagcccatatcatctgggtctctttaagttccatctatcacgccaaaagccttgatgcataggtgctctgaagctccctagtaggaatcacagacttggagtggaaatctgcctcgtttgtctgatacatttgtatggtgtgtgtgtgtgtgtgtgtgtgtgtgtgtgtagtttctaggaacctgtaaactggagtctaaatgtctggcttctagtgccaggtgtgaatagacttggccaatttattagactgagaaattcttagcttttttttttttcttttgagacaaggtttctctgtgtagctctggctgtcctggaactcactctgtagaccaggctggcctcaaactcataaatccgcctgcctctgcctcccaaaggctgggattaaaggcatgcaccaccactgccccgcaattcttagctttttttttttttttcagcagagaaatattaataggagatcaggaggcctaggatttttagatttgagaaggggctaaaagatgagcgttgttggtcaaaagatggaatgcctgggtagaagtagaaaggaaacagatgtgtctctctgacagctgaggtttaatggggaaccctaatgttttcctcaaatcctgcccctataacaaccaagttgcagcttgtatctcttcttttgtaaacaaagggaggatcatacttcatttgaatatcagttcatctacactcaaccaatttcaaaatatgggaaagtacttccacatctacaaaaggtttttgttttttgttttttgtttttgttttttagtttgaatt

SEQ ID NO: 35651 - DNA, 1217 bp, Mus musculus
tcctcctacattccacctacgtggctggggctattgggttccagttccagctgctgagcttaggacagatggtgtctgcaattcctttcagccatggaggcggagatagacgtggtttctaaaaataactagtggttctggaggagtcctattttgttaaaagcatgcaagtagtttttgttgcagcttttatccctctaagattcctatcctcgttttaaaatatacttaaaagatgtagagatatagaaatgcttagaaaaacatattgaaaagacacagatgtataagtgcttggtgaatgcacgttgagaaacatttcacaatagtaaattgaacaaattacaattgagtttattacagcttgtttttatttttgttttgttttgtcttgttttgagataaggtaggtcccaggctggcttagaactcatgactctcctgccttagctttccaagtgctgggataaaaggcatgaaccaccaacccaggctcagaaatgtgtgtgtgtgtgtgtgtgttacagtagtagaaagctgtctcatagatggaccagtggggacccatccagttggcctctctctattccttatccacagatgtagggcatcgctggaatgaggacccatgagctcctattagccaaggcaaattctcaaatttatggccaactcccatatagaaagacagaagtttagagcactatttccaggttttgtgccttgcattgaagaagaggaaggactagtttttatggctagccttaggaaagccaagtaagagaaggggcaggggacaaggtcagaaaggtcttgcttcaactcaaagtacagaatacatcaattctctatataatttgtggcagtgtgttctgagcctgtatcactaaggagtttctttctttcttttttttttattaggtattttcctcgtttacattttcaatgctatcccaaaggtcccccatacccacccccccaatcccctgcccacccactccccctttttggccctggcgttcccctgtactggggcatataaagtttgcaagtccaatgggcctctctttgcagtgatggccgactaggccatcttctgatacatatgcagctaaagacaagagctctgaggtactggttagttcatattgttgttccacctatagggttgcaattccctttagctccttgggtaatttctctagctcctccattag

SEQ ID NO: 35652 - DNA, 1121 bp, Mus musculus
acctctattagctacctgacagtacctttgattctaccattagccttatagcttatgctctggaatacccacagtgccttttaaggtcattggtactgtcttcatttccttcaatctaaaaacaaggtctgatgatcctccattttcctgtcccctgtctgtgtctgattacccattctctgaagctaagacagcctgtttatttccattgtgtgcctgagacctgtgatttttcagtgcagtacataatggcttccccattaatctctagagagtcatgtgttctgcactgtccagaaccgtgtgcactgtctcctcactgcagtgagtctcagatcttggtactcaactatgacataagcaataggagattctcagcagagaagggttagtatcattgggctggttcataaaaagtgggatttagggaacagtgggaacttggagatggaattttatatgtcctctgccactctgctttcaggctgtcattactagacctctgaatttctcctctgtcctctgctaggaggcctatggcagctgcccagtcctacctcagcccatcttgaaaacaatcttaggcaacatggaaccaccacgaggccctcctgttagtggggctgagccatctcgggcagttggcactgtcaaagtgtacctgcctaacaagcaacgcacagtggtgagtcactcaggcagtactggcaggggttccagatagtcgtagtgtgggatcagaagggtggcgagggttagggaatgaatgctgcagagggaaggaataattggctagggtacctattggatactgaagaccccaatctctacacacacacacacacaggtgactgtccgggaaggcatgagtgtctatgactctttggacaaggccctgaaggtgcggggtctcaaccaggactgctgtgtggtctacaggctcatcaaagggtaagtatggaaaccccatgccattcactgggtccctacacacctcctttcttcagtgccatcttattcctcctcatttgtcttggagtcttccactatctgaggtaacccaggtgacatctttcgtttcccttcattgaccattggaaggtctgcaattcactatgcac

SEQ ID NO: 35653 - DNA, 1201 bp, Mus musculus
cagggtcccaggtagggatgtcgtagatgaaaggccagggggccagtgaaagaaggattggaggaccctgagagattatactttcgtttatttgtttacgtgataaatactattgagtacctacaagtgttgaatatgggcatgggattgtgggatcattggtaaggcacccagtcactccaggtttcatttttttcatctgggaagaggggatgagattttccctagtgggttctgaagaggattaagggttgagatatttgcaatgcttaaagcaagatctgatacagagtaaataacaagtgttattcattacaagtgtatatataaaatcatctagtttgttcatttcttccagtataaccacaccccagtcttttctctttgaaataaatgttactgtatcagaaagtacttttatttcacttatgttggatatgatagcatatagttttgcataatatataaaaagtaaggttaatgtattattatttgtagttatgagtgtatgtgtgttgatttacctgtgaatttaatctcaggatggtgaaagtaacagaagaatgtttttctgtaaggtataattcatgggaggtggaggcaagacgatcaatagttcaaggctaccctccactaagtagcaagttcaaggccagcctgggctacatgagactgtcttaaaacagtaaaaaaggtgttttgtaacgtgatatatgtataatcgttatatgatgtgtgtaatgtgtattacataatataatatgtgtattgaaaacgttgccattttaatataggtaatgctcattattataaaataaataatatatttgaaaaatacatgtcattatgatatgtaataaaaagtcatatcttaccctttctccaactatctttgtccttcattgttccttctttagacctttctcccaatattaccctctctgagaacccactcctgactcccccagggacactttctacctccttcatttgattttcctctttttgtgcctatcactgacaggcacattatatatttgcttttttattcttctgcctctgctaaaaactctacaagggcaagagctttttatttatggtatccacagtttgatctcctctgtttcgagttgcatctggcacacaggaggcactcagtaaatgtttcttgggcagatgattactggtctgaccaacagac

SEQ ID NO: 35654 - DNA, 1122 bp, Mus musculus
acataactcactagaacaggggttctgagaaccatccagtaagggtatgaggcatagctattgggattccttgtaatggcccttgaccctgctggatatcttcttacatgaggggctcacagtcaagattggtgacttcggcctggccacagtgaagacacggtggagtggggcacagcccttagagcagccctcagggtctgtgctatggatggtaagttgggccaggctagatggggagcaatgggagatgtggacttttggattgggacatgccaggcaaagtggggatgtctttgccaggtgggaatatctagactgcccatgttttacctcacatgggtggcactgagtcattctcagtgtaactatcaggatctgatactgtggactagtcattttttgtccctcatggtccccctgccctgtctggcctacctaaggcagctgaggtgatccgtatgcaggacccgaacccctacagcttccagtcggatgtctatgcctatggtgttgtgctctatgagctcatgaccggctcactgccctacagccacattggcagccgtgaccaggtgagcctcataacttacccgcagttctcagggcttcacactctaggtcccctcacttgtacagacagtagtctccccgccctaagcctaggatttttctgaatgaagagtcctggaatctgtcttttagatatcttatatcccatcctcctcacacatccacaaacccctgagccagaacccttaaaatccagatttctttgactccctatattcagaatgttcctagaccccaaacccttcagaagccccctgaacattctgagtgtccaacactcaggccctttgtgcttctcaaatacccatagtcaccctgaatttggggtcttggaattcataacactctaggtcttaaattctcacacaattctccgaatttaagatctagaaccttccctgttcttagataccaggtccagatatcaagtatttgagctttgagtactacataagtaagtctacatagacttatttatgccccagactcctacagaaatggaagtttcccccaagaagtagtgctctgcattttcccgaatcttagtat

SEQ ID NO: 35655 - DNA, 1549 bp, Mus musculus
ttaatataaatccctctcttttatcagcagaaaatcctccctagtcctcagggacacagactcctctgggccttagtactagacacctctagtcctcaaaaattaacctaacatatattttaagattcatagatccctgggcctcccagctcaaaccccaaatcaacccattcctccccacacaccagatcatctttatggtgggccgtggctatctgtctccggacctcagcaaaatcttcagtaattgccccaaagccatgaggcgcctgctgactgactgcctcaagttccagcgggaggagcggcccctatttccccaggtgggctgggtaggagggctggataccttggggagatgcactgtgagtaaagagatagaggcagatattgaatgtgaaccatgttgaaagctggggattggggatattggagtatctctgggactctggacacccctcttcatctccacccgctcccagattctggccacgatcgagctactgcagcggtcactccccaagattgagcggagtgcctccgaaccctccttgcaccgcacccaggctgatgagttgcctgcttgccttctcagcgcagcccgtcttgtgccttagacctcactcccagcccaccagggagccaatttcagcataccatgccaaggcacaccgacctaccagccaataactgttctgcctctgccttgatactgcctcaggattccctatcccataccctgggaaatttgagggaccccaaaaactgaggtctcctgctttctccataatttggtctcctcttgggtttggggatagttctaatttggagagctgttttatctccaatggctgtgactcagtgcaaggattccactcagaacctctttctaaagtttttgcctgatgtgtcttcactggattttggggttcccagcaccccatgtagatttgggggtttctttttgtctcccccactattcaaggactctcctctttaccaagaagcacagaattctgctgggcctttgcttgtttattttgcttcccgactcttctcttgggggttcagagccgctgaggggtggggcaagtccaggcaaggagtggaggttggaggaagatgcagaccacaaaaacagtgccactgtacgcattaccacaggcggcatgaatgaggaccacatatgccaagcatggcacaaaaggaggccaagtcagtcacagataaacacattggcaaaggtaggggagtgggagaccacaggccttccttgtgcaaaggattctgaggatgggtggagtttgcatatttaaagacagctgtcagaggcaggaaattggggaggggtttctggaggagggaacttaggggtcctagaagtggaaggaacttccagtatattgaatgggatggagaggaagaggtgaagggaagtccttgagggactgcttggtggatggtaggtggcatttgaagatgtggatctccagagagatgacctatggaagaggtttaaggataggggcttcttatggaattggaaatt

SEQ ID NO: 35656 - DNA, 1165 bp, Mus musculus
atatctaagtcctctcagctgaccccacattcgcctcagtctcagcttcatcacccttgagaatccatcagggttcaggggcatgcttgggggtgggaaggtcacaggcacagcctcaggatcagaggggcagggctggggctgggcctagggtaacattgtgtttctctcccttcctccccttcctcttcccccttcctcccatgcctccaccttgtctctctctagcaaatcccagtctctgaccaatgccttcaaccttccagagccagcccctcccaggcccagccttagccaggacgaggtgaaagctgagaccatccgcagcctgaggaagtctttcgccagcctcttctccgactgacatcccactctgagaacccctaaacccctagacagccctctctgggtcctgagtccatttctcacttttggaacctccaaatcccttgagaacccctctcctggttctcctagagcccacttctcattcctcagtatgtcccttgagaaacctggtcctaaatccagttctcacatttgggaatccccaagtccatttagaatcctgttcctggtcacctccagatctgtttgagaacctccaaactcctgaagacctctacttctggtacatctaaagggtgatttcttccctgaaagttcctgaatggcagaaaacctgtttctgacctaatacatcgaatcctctcctggagctctgaaattcctgaaaaaccctattctactcttggtcctgaatctctccaacacaccttgctcctaatcagaaatttccaattccataagaagcccctatccttaaacctcttccataggtcatctctctggagatccacatcttcaaatgccacctaccatccaccaagcagtccctcaaggacttcccttcacctcttcctctccatcccattcaatatactggaagttccttccacttctaggacccctaagttccctcctccagaaacccctccccaatttcctgcctctgacagctgtctttaaatatgcaaactccacccatcctcagaatcctttgcacaaggaaggcctgtggtctcccactcccctacctttgccaatgtgtttatctgtgactgacttggcctccttttgtgccatgcttggcatatgtggtcct

SEQ ID NO: 35657 - DNA, 1159 bp, Mus musculus
attcaggacctctggaagagcagtcagtgctcttaaccactgagccatctctccagccctccctgctgccttttcttatgcttgctcttcctgcatgccaactgttccccatactatcacttctctgccctgtgggacggttcttcaggaggcctgtctgagtgacttcaagtgacagttctctaacagcaattccagaacactggctttctgttcctcaaatgggagaagctgttcttgggtttaagcacaagtagggcaacacaaacccttcctagcagctccctggtgtgtgtgtgtggggggggggagggcgggagagagagagagagactgagactctatacaagggagagaacaaacagagggaaagagaaatcctcagagatgggcctttttcccctcttctaggtgtttccctgtttatctatcccttgcaaactggagagtgacactcactgtttgtggacggatcaggtcctcgtgggctctgaggactaccagagccgtcactttgcttgcctgccacggaatccaggcttgtgcacctggagatcccttggggcccgatgacctgaagccttcccccaggaaaaactgaagcctgaacactgtctacttttcctccatctttctttctcttagatggtgaaataaagaactatcagacagcagcaatatttctgtatagtgtttgggaacaagcttaagatactgataacctgctgggagcttccagaaaccaatgaacaaggaaaagatgcaaaatgttgagtttggaggctagaaatgaagcttagtggtagagcacatgcctggtatgtagaaaaccctaggttcaatctctagcggaaaaataaagcgggggtggggtggggtgggagtggggaataaaggccagcctagtctacagagcaagtttgtgaagttcaggacagccaggactacacagagaacccctgtattggaaaacaaaacaaaacaaaacaaaacaaaacaaaacaaaacaaaaaaggtgttgagtttttatactttacagaaattttgatatattggtaataatctcaacattgggattagcactgagaacctgcaaaacagaaatgatcattactttgcattatcaactaaaattcatttaatattccctctactcaaa

SEQ ID NO: 35658 - DNA, 1831 bp, Mus musculus
gtggcagcgcacaggtgcacatcccttccatcagtgtggatggcctctcgacccccgtggtgctctccccagggccccagaagccatgactaccaccaccaccccttttttggagtccatccatctatgctcctgaactctccagttagccatctcaaggagaaacatagttaaactgacagacttaagctctgattgtggtggggtggatattcctggaaaagtgaatatttcactaactcctccacccaaaacagacaacttctttcttctttgccagcctcccagtggctgcccttacacgtctcctacttcaatggtggggcggtttatttatttattttttgaaggccactgggaagaatctggcccaacctttttaggggagtgggtaagacatctcacccatttcctccccattttttcctaaaacaagacaatcagggcatggcttgagaggaacctttatttatttatttctcagcctgcccttggggagttgagggtgccctgtcttcattttgcgacatgggttgaagaactagcttgttttgttttattattcctggctgtatctgagtccagggagcccttgtacgatttaatggtttgggagtggtagccagggaatcaacactgttaaaataggaattgctacctccctaaccttcttctcagtcagcttgttcttttctcaagtaaccttttggccagggaggactattccttttgttgttcttcccccctgagaagccattcctttgtctgccaaatttcctggggccctgcctattacctcccaatggagggtttttttgggtggtggtccccgtctggggggcccctccagctagtactccaggtctctgtctcccacccccttccattttgatagtataatctatttttaaatggggcttttcaataggggagagggaaacatctcttcctatatcagatgggtgggtaggcgggtgggtgggaagtaagggatttggaggcggtcttcctgccacccccaagtgtttattttttataccaaacatgtatttttggctccctcccagccccccaatttcctgcaggcgggtacaaaggacccttttaagtgtccctggagttgggagggaggaatgggggacatggagcctgtcttatatcaatctaggctggaggaggtggatcaaaagactcccaggctcacctcctgtcagcactggcccagaccaggcctgaagacctgggggttggtgatttgggggacggtgctatactcgtctccactacttgttttgcttccccaaaatggacctttttttctaagagtcccagagaatggggaattgttcctgtaaatatatatttttaaaggtgttgctgaaagctgttggtatttttttttctcctgtgtcaccaaaataagccatgacagccacgaatatgaagaacaataagggcgaggcaaagattgactgtgagagaggcaaaatgatggcatatgtcagagactgatacagactgctgattggtaaccagtgtgatgagagaaaccgaaagattttaaatatgtgtgtcgcaggtcagaagtgtgaccgcaaacatttttgtacatgtgtatgcatggtcttatgtgtggtgtgttgtctactggaacactgtcccctcctttgagacagggtctcatctttgcctaaacttaccagttgggatacacttgctggccatcaagtctcaaggatctacctggttctaccttgggattacaagcatgtacttctatgcctggaatttttacctgtattgtagggatcaaacggtcaccttttaccac

SEQ ID NO: 35659 - DNA, 1107 bp, Mus musculus
accagccatcttctaattttttctctatctaccatcttagtacctgttaaattgtactgtgaaatgcctttctttctcacgctcattgtcttttacagtcagataataagtatcacttacagttttttacagggctgagacttgaagccaaggtctcctgtgtagtaagcaagagctctattactgaactctatgtccctagcccaagttacaggcagtgtaaaggaaaaagcttatactgtgggtaactaaaatagtgtaaagcacagtttcttttgaatgaattatgctagaaacaaatgaagggatggtcaaaacttatctatgtgggtagtggtgagtagagaaaatgtgggctccaagttttgtttttgtgtagggaagaactactttgggtgagaagcttgaaatatagatagtgctgtagttaaagagatggctcagcagtgaagagcatttattactctttcaggagtcccaggttctatttccagagcctgcatagcagttcgcaagcttctataattccagtgccagggtatctgactccctctcctggcctctgaacaccaagcacacaagtgctatacagacatacatgcaggcaaatcatccatacacataatacgtaggtactggaggccacacagaaggcctcaaactcccactctcagacaagtgacatttgagtcagtttattgggtgaatcaagccatgagctatctggggaagaatattcttgacaaaagggacagtgtgtctggcaggcttgaaaaactgtcacatgtgacatagcttaggaaaaatgagtatgagggaacgtactcccttagataaataaccactcacaagtatgagcacctgcaatgatcattcctggattcgttcctagagttgtcgcctgtacggttccagtagttcttctcttaagctttccagagattttagtattagtagacctgaaacctgctaagatttctaaattttgctgatcaaactataatttgatcaaggtcattgtaatgctgaactatggacatttagaacaagtcccactttttttttctttttttttggttttttgagacaggatttctctgtatagcc

SEQ ID NO: 35660 - DNA, 1220 bp, Mus musculus
ttgcctctcaccttctggttatctctggtgttagctggccttgctgtcactgactgcagcttgtccctcctgcaaggctgtgtgtccgtactcctgggaggccagttctctccaggaggaatttgagcatggagagctgtggcacagggtcagctctggggtgcagacagaaaccagaaggatcctgtctctggctgttccttggttcctgtgtcctgatggcagacgctgggtgacagcagtttctggttcactgccagcgggcctcatggtgccttggtggtgtctgtggtggctgtagatgcacagctcggccagaggacttgtggcccctggggccggtgtgtctgggcagaaccgtgtatgtgggccagcctcaggcatgcgtgtctacgctactgtagggcgggacttcctaccagtagcggagtcgtggcccagagtacacggtgggcaggaaaagtaagggcccaatgtagcctgtggcactggcagagcatgagtgggctgagggagctcagcgagaaggggaggagggcagcagaatccaggcctggcctggaattctcagccaccagaaataaactgtctctgggaccatgcaggtggtcactctgaccagtgggaacggggacttgccagatctgggctagcgagcgtggttgtggctgagatgggatgcaaacctgtagagtttttggatccaagtcacaccaatgttgtgatcataaaatgataaagagggccgggcgtggtggcgaacacctttaatcccagctctcgggaggcagaggcaggcagatttctgagttcgaggccagcctggtctacaaagtgagttccaggacagcaagggctatacagaaaaaccacacacacacacacacacacacacacacacacacacacacacacacacacaaagataaagaggtattaatgtatgttctaaggtggtatgatgaggcgtgggggaaggggatgcctctgcgggcccatgccaaggcatcccttccccctgagggaccagccacaggacggtatagcatagaatagagtttatttagggcatggggaggggagttaagagagtagtagagacagagaaagaggcaagagagaaggagagtgtagagaagtagaggccggccatgaccatgtggagagagggggggagggaatagggagagaggcaggagcaagggggcaagaggtaagaa

SEQ ID NO: 35661 - DNA, 1183 bp, Mus musculus
catagccccagtcaaacaatatttaatgtataaatatttactgaagttgggtcctctgtaaaaagctttcttaatggctgagccatctttcaagcctcttttttatggtttaattttgggtgaacaagtaagcaataggctcaggtttgagggggcaatgttttaatgctgtaggtcaaacaaggggctttgcagatgtgaagtgctcccacattctgctgtgtcttccctttatttttgaactccataagagatagatagatagatagatagatagatagatagatagatccatccatttccagggagaaaaaaaatgtagggcccactagcttgttcctggtgcagtctacattaaagattctcaagggaaccagaaatagctatttgatctttttaccaatagaaaatcatctccatttaaggttaatctgcagtcaggtgagagctcaggttgtgccttatcctgtgaatcttggaacaccttcctgtgcaccagatggcaatttgttccagctgcatgtggtaaactgaagtgacagagacatagactgaaaaggatgggataaggatgaactgtaggatgcaaatgggctaaagttagagggaaagagagaaggctaatgaagcaccaagtatgggtcaatggagtagtaaagggcagagttggggagcgaatagggggaaggaggagaaatatgaaatctccagtggagtacagtacttgagactagatgaacataagcaaacatggatttgagggtgaatgggcaaagaaaattgtattggaagtgagggatggtgaggtatagccaatgttcctgctcgatgaagttgagtagagaaccatgcaggtgaatgaaaagaggaaaagggatgggtcaacaaagtaggcagactgctagagtgaaagaatgatgagtattcataggtaacaaggagctatggtatcaagagttacaatcacaagaccttgggtaatgctaggcaattggtgagagccaagtagagaaccccaccatgaacataggtatatgagatggaaacaacctggactctggactcagtgttcaattaaggtcagctctgttctccatgtccttgtgggttatacttagcatgcctcaagatatcatatatttttttaaaaaagtagctcaggccaatgtatcagctcctctgc

SEQ ID NO: 35662 - DNA, 1189 bp, Mus musculus
acatcaaagaactcacactggagagaagccctataagtgtatagaatgtgggaaagcctttacccagaaatccaaccttattgtacatcagaggacgcatacagtaaagaaagcccattgaaaagaccacactcacaagtcaaagcctactacgctatattgtcttttatatattccaaaggaaatatctattcatttaatatttaaaaagtatgacctgaattctagcctaatcattgggataaacagcatttcctttcatctttttcaccctaatgcaagttgaaaacgtagtgtatgtgtaatttctttgaagagatgaagagaccagataaggcaccagtgcaggagatttaagggcttccgaagtgaggcagcatagctaaggactctggagagggttcggtagcacactaaggttcatgaccacagatagctgtgacaaagaccatatgaggtctggggagaaacaagcagaaaaaccttgcatttacagaaagtaatctgacagatttgaggaacagctagagatggggaagatagggatatagttggtcttgtttaatgatttggacaaagtaaagtctgaaagaactaatatgtgtatcagttgtttaaaaaactgtgatcctggcacattctccacaaaaacttttggcaaacagcaagtccaggaatgatttttctcattcaaagaaaagcatttaaaggtaatgaaaaccacaaataaatttcaacttctgggaatacatatactcatatatgtgtaaaaataatcaaaatgcagaggtatttgttgatgcattgtttgaaaacaaaagattagaagctgttgaaattgcatcatgtggattctgcttcctgaaactgatatattcttacagtagactcctcagagacaaaaatgaacagaaagaacgtggatatgatttttctagtgatttgagataatctccaagttacataattagctacaaaaagcaacgcacaataaagtgagtactatgtgctactatttgtatataaaagggaggaaattgtaagtacagaatgaattgtatgtataaactgttcctggaaaggaatataaaaatgtaattacaattactaccttacaaaaggaaagaggtcagtaggttactagggagatgaaacttggagacacattttgtattctttcatagctttg

SEQ ID NO: 35663 - DNA, 1216 bp, Mus musculus
cttctagctgaattgccctacttggcttcaaactaactctggcaatttcttctaatctttaggcttcttgttttccagctttaacttcctcaattgaagtgaaccacatgaacttaacaaactcaacttcactgtcctacattcactgcactgactcccacccactgaactgactgaaatgccttcactcttcttgaactactcttaaatagcacttcttctgagaactgggtgtatcctatctctgactcattctgtcaaatctttctctaattcatcactttgtctgcccctcaattagatgccaaattttgggattaaaggtgtgtaccaaaggattctagctagagttattaaaggtgtgtactaaaggcatgtctacattccagccagatcacacagtttaaagcagatatgttgctggataaaaattcttctaaaaattctcattgccatttctctcagcatcaattgtctcagttccccccaataaaaggacacagactaatagaatggatgcaaaaataggatccatccttctgctgaatccaagaaacacactgtcctaattcttttatatatagccttcgatgtcagctcttcctatcattgtgaagcagaattcaccaagcgttggattgttcacccactaatagggaacgtgagctgggttttttttatttgtcaacatcaaggctatatcatgtcagagttaatggatgggaaagatattctaataaaaatggagctacaaagcaagctagtatagaaatttttattactgacagaatagatttaaactaaaactaatcctaagagatagaggacactacataatcattacaagaaaaaacatccatcaagagtaccttttaatttttagcatctatacactaaatacaaaggcacctaaattcataaacaaaacattactaccacttaaatcacaatattgactatcacacagtgatattgcaaaactttaataactcattcttgccaataggcaggacatccattaaaaaaataatactgacttaaccaatactggacttaaccaatgatataaaccaaaggacctaacagatacttacagaatatttcacccaaatataaagaatgtactttcttctcaaatacctcatggaactttcttaaaaattgacagtatactcagactcaaaatgagtctcaacaagtacaagaaaatagaaat

SEQ ID NO: 35664 - DNA, 1872 bp, Mus musculus
tgaatactactcacctatccttgaccagtggaccccaattgcttccatgttaagagggcagagtgatgttggggtcgctgtctttgagaataaaatctatgtggttggtggctattcatggaataatcgctgtatggtagagatagtgcagaagtatgatccagagaaaaatgaatggcataaggttttcgatctgccagagtctcttggtggtattcgagcttgtacacttacagtttatccacctgaagaagccacaccatcaccttctagagagtcccctctttctggaccctaagatcatccttacaattaagatgctatattcctatctttgcaatgtgtcatgattatcttcttttccccccttaagtagcatatatgttagagttagccttcagtaattgatacagaaaaaaaattgacattgatgttacttgtgatgtttgtatggcctagaatgtttataaagtggtaacaaaccatccttgaaatatatcccatagaagctgatgtttaacatgaaaacaaaaaaagtattgtctacaaagtgtttcttcagtactttctaaatgctgtgtactgagtgtaagggattcctcatcttacattataagccaagttgaaggtggattatagtaaatgtacaactgtgctcactaggtttcaaagtgaagaagttttcctttcatctttaactgtaagatgtcaaagggaggcagcctgctccaataggaaacagtacacaaaaggttgccaactcgcatgagctacctccctcttttcataaagtatttttgacacatctgtcaacccacctgactgtgtgggtgcattgagaacacaccaagtttctaagacacacaggagaaataactgaaattcaccaacactagtttgtgggggaaagcatgacccctctgcttataagaattggtttggggttttttttaagtgtgtatagatgaacacacacatacttatatcaaatacaaatttttaaaaattgactgtcaggtcaaataaatgtgaaattaaacaaaattcttctaaaaagcagcttccatgaaaaatggggattcagtatgcacacattaaatgcatatatttcaaaccatactgaatttaggtggataagggctagaaattttgagcaactaaatttatcacttgaccaaattttaccataaagaattatattctctttttctcctttgctgttgaagtaacttacctgttgtgtggattctgtattctgtacactcttggttcatgaggttatttagcacaaagtgtaacagcttcacctgggaagctgcttttgctctatgatgtccatggtttcccttcttttcttcaataaaaacatttaatgtcattctgctctgtgccatgccgttactcctcagtttgatttccatttattctgtatctttcaaggggtgagattgaggaggtcgaacatggtgtatgtgtatgtgacttttattcaaaggacaaagacttgggccagccctcacctcactgtgtagatactgctttttgcctttgaggaaatggtttgtgaaagatgctaattggatcttaagcagcagcagtgcaaagcctgggtaaactaaaagcagttacatgtcctccctccctttctttgctcttctcttcccttcctactgtgacctgcaaagcttggtccagaaaccctatctaagggtgatgagggtaatatataaatgtcagatatgtacacaaaagctggggccaggtgaggtgctgccactcttatggggtggcatttccacctgctgcaacccaagcatgttgggaggagcgtgggaaagggggggctagtctgggtaggaggtatatacagcc

SEQ ID NO: 35665 - DNA, 1238 bp, Mus musculus
tactttatgtggaaggtgacaaattgattactgatatcatgtccacttaataaagtaattaacacattattgccaatcatctttgggttaagaatggtggtattggttgtagcagttgccatggtgaaatgtgtatgaaataaaccagccagtaattataccctcagattcagctgtacaataggttttacagatagtgatgtttgttcctgtacgctatgtcaaaaataggtactcagaattgatgtgttattcttcctttgtgatttttttatcttttcctgtatttttagagcaaagaaattggagaaatgtcaaaataaaaagtgaaaaacagatggtagaaaaaattcttagtgatttttacatttgtttaatattttagaaatttatataatctagcctaatataatatctcttaatgtttcattttaatagtctcaaaaactataagatgccctctaaggactcatattaagcattttcagagattaatttagtagtattattattctactaaaataaaataaaacttgaaattaaaatatgattgcatttcttttctttttgtttttcaacagctactgtggaatgttacaatccgagaacaaatgaatggacctatgttgccaaaatgaatgaacctcactatggccatgctggaactgtgtatggaggagtgatgtatatttcaggtagacaaataccctgtgaacttatcataataatgtttattcatttttaattgatttatgtattcactttacatcctcatcaatgcccctccttccgaatgctttcccataccctaccctttcctctgagagagtggaggcctcccctaggtatctcccaccctggtacatcaagtccctgtagagctagatgcttcttctcctactgaatgagatctttccatatagtgccagtaataataacaattcctgggaaaattgtaaaaatatatttatattttcaggagacttttatgtgtgtatttgtgtgtgaataatttgagtattctgtaagtttacaatctagcaccaaaccaattcagttatagatgtataatgtatgagaagttagaaagcatttatctccagttaatttttaatgtaagtcccaatactctgtattctagtaaacactatttatacgaagtaatcatttgtttgacttaaaatttggctaagccatattaggaactaaaacatacatacaaatctctttatgtgtaa

SEQ ID NO: 35666 - DNA, 1888 bp, Mus musculus
aagaaacaactatgctattaactcatttcttataaacactaactttgagaagaatccatatgaagaatagtaacaaatgacacctctatagaaaaatggaagtcaaagaattagatagtagacattttttctgttttgtgacctgctaattttatgtgctattttgaacaaccaagaagaagaagttgacttgactgtaattgaataacatacaatttttcctaaatttttcatctagcaattatttcattagtatttaggtaggtaatttccgaggaagaaaaaattattttggacatagtcaattgaaatgttgtcttaggttaagagctttttggttttgtttagccatcattttttgctgaaccaggtgaaggttttttgtatcgtctttacacttttatacacttaaataagaatttttattcacacttctatggattttacaaagcattcttcctctgaaataagagtttttgtgatcaaaatgtagatgtccagaattttcttgttttcatgtttgaatttttttattggattcgtaggtcactttggataactgtgttgaagttggacggattgccaacacctaccatctgacagaagtggataaatatgtcaacagcttcgtcttaaagaattttgctgcattgctgagcactggggagttcctgaagcttcccttcgagcgccttgcctttgtcctgtccagcaacagccttaagcgctgcaccgaacttgacctcttcaaagctacctgtcgctggcttcgcctggaagaacctagaatggacgttgctgcaaaactaatgaagaatatacgatttccgctgatgacaccacaggagctcattaattatgtgcaaaccgtggatttcatgagaactgacaatacttgcgtcaatttgcttctggaagccagcaattaccaaatgatgccgtttatgcagccagttatgcagtcagacaggactgccattcggtctgacaccactcgtttggttacactcggaggagtcctgagacagcagcttgtcgtcagtaaagaattgcgcatgtatgatgaaaagacccacgagtggaaatctctagcccccatggatgccccaagataccagcatggcattgctgtcatcggaaattttctctacgttgttggtgggcagagtaattatgacacaaaaggaaaaaccgccgtcgatacagtgtttagatttgatcctcgatacaacaaatggatccaagttgcatctttaaatgaaaagcgcaccttcttccacctaagtgccctcaaaggatttctgtatgcagttggtggacgaaatgcagctggagaactccgtaagtctttctacttatactatatataggattttttttaattcagaaatttgttgttggtaacaaaaaaaatttagggataaaaatatgcctagggcttcctttgtaaactatttttctaagaaaatatcaaagataatctgtatgatttatttctgcataaaatattagccatgatccaaactataactaatatatagtttgctgaatttgaacagctatataattttcatattgaaagatcaattggaatatatattcaagtaatttatattctaatagagtctgatagaagtttgacatcattcttcattctccactattaaaaacccacaagctgcctggcagtgatggcacatgcctttaatcccagcactcgggaggcagattcctgaggtccaggacagccagggatacacagagaaatcctgtctcgaaaaaaaaaaatccacaagctatgctacttaaaatccttctttacaaaggcttggttcttcttatttcctcatttccagaattgatatctaatagtgaccacacagtaaga

SEQ ID NO: 35667 - DNA, 2026 bp, Mus musculus
taattggccaaacagcagcagcagtaagctgagtattggaatatttaaagtataatccttaattctctgagagggtaaacaattcagatgataaaatgaaccccagtcttgcacttgatacagataaataccctctccctttctgtctcaaggggggaaaagtcatcaaaatgcaaaataatctattaaagttctacagcactactatccatgtgattatggaaagcaattctggaaggtcgaagttttttatttcatgtgtgggaaaaatagaagtgtaaatggtcatctttttttcctccaattagggaaaataaatgtcccagtaagtgatttcaacatgcttaccctatttgttcctaatgtaaattagccttagtagtctattgtttcatgtagttaaatctatagataaataaacaaagcagtgttttttttgtttctttctttctttttgagaactcttttggctctgttttcaaaataccctagatgtatgagcttgtaagcataagtttagcacagagagattgtacacgttttctccattccttactcaacttgtatgcttgttacagggctttgaccagcttcggcttgatggattgctttgtgatgtgacactgatgccaggtgatacagatgatgcttaccctgtgcacagagtcatgatggcatctgctagtgactacttcaaagctatgttcacaggtaggttggcttttgacactctgtgttcacattaataaactgggggacatctgtgtgtgtacgtatgcatatatctaatatataacacacatacaatatatatgtaatatataattccaaacacaaaatccagtattttgctttttgtcattctaaaaaaacactttcaaaagaaatagtcactaatctgtgtagttgtgtgtggtgctatttaaatcatgttttctaccatctgttctacttcatagacttttaaaaaatatctgagtggacaatcacagactctgtgcttctataatatggtctttaatccatcaaacgatatgaaatgacagaccatttgaaagcgcttgtattatatatgatctccattagtatggatagaattgcttcaagtgtccttttagctgtaaaaatgtacaaaagcaaaagtgtggaatggatgcttacttggaataagactttcccttggttttgctgcatctaattactggcagaaccaagcctgaccttaatgatccacctccacttaattgactaacttttcacttaaggtggaatgaaagaacaagagctgatgtgcattaagcttcatggcgtgagcagagtgggtctacggaaaattattgatttcatctatactgcaaagctttctcttaacatggacacccttcaggatacgctggaagccgccagctttcttcagattcttccggttttagacttctgcaaagtgtttctcatatctggggtaagatgttgttatattttatttttcttgtcatacatgttcatttagagttagagaccggcttaattgtatagtcatgtaatactcatcatcagaaaaagatgctgtataacacgtggtgtagaaattaatgggaaataaaaccagtgaattttataaagtggaatcattcaacaaaatccttttctatagtcagatgatgtggaatactaattatatttgataaatgtatgtaccttaacttgttaaataattcatatactttaacttagatttagttcattgattttatacacttgacttaattttatatagtagacttcttgtatagaattgcatagaaaagtaatttgagcttctagcgttctgtttaaacaggcttggctgttttttttttttttcccttctttgaatatggggactcaatcttaagaactagcagttaagtgcaaacttgcaaagatgtgaatctttagtctttagaacatattacgctgaagagtggttagctctatatcaactaatcaatgaactggataacagttactctgttcctacagatac

SEQ ID NO: 35668 - DNA, 1148 bp, Mus musculus
gtcaataggttcaagtttgagacggagttattaaagattttttttctttatacaattgaatcttttactttttattagctacctggttttgttactctgtatcctagctagcctcaattctcctgactcaaggtgtaggactagaggcatatgccactcatacccaaatcaactttttttaaacaattttttattagatattttcttcatttacaattcaaatgctatcctgaaagtaccttataccctctcccccaacctgctctccaacccacccactcccgcttccaggccctggtattcccctatattggggcgtataatctttgcaagaccaagggcctctcctcccaatgatggccgactaggccatcttctgctacatatgcagctagagacaggagctctgggggtactggttacttcatattgttgttccacctatacagttgcagaccccttcagctccttgggtactttttctagctcctccactgggggccctgtgttccatcctttagatgactgtgagcatccacttctatatttgtcaggcactggcataacctcgctggagtcaattatatcagggtcctgttggcaaaatcttgctagcatatgcaattgtgtctgtgcacggtgttaggtggttgattatggtatggatccctgaatgggacagtctctgcatggtccttccttctgtctcatctccaaactttgtctctgtatgtaactccttacatgggtattttgttccccatactaaggagggatgaagtatccacactttggtattccttcttcttgagtttcatgagttttgcaaattttatcttgggtattctaagtttctgggctaatatcatcttatcagtgagtgcatttcatgtgtgttcttttgtgattgggttacctcacttaggatgataccctccagatctatctatttgcctaagaatttggcgcacgcttttagtcccaacacattgggaggcagaggcaggcggatttctgagttcgaggccagcctggtctacagagtgagttccaggacagccagagctacacagagaaaccctgtctcagaaaacaacaacaacaacaaaaagaaaaagtgcaaggccaaatcaactttaatgttttga

SEQ ID NO: 35669 - DNA, 1200 bp, Mus musculus
ccaagcattgaaacacatgagtctatgggagccgtacctcgtcaaaacaaccaaagaaatattaatttatttgggtattaataattatttcactgtgaatgggaccatgtatattaaaacaccatgatatataccttaaatgtataccataaatgatataaatagatgatgggaagatgtattcatatacctatgaatgttacacaagattttaaaataatccataaaggactataaaaagcactttgatgtaaataaaaaataaaatatcagtattttttatttgtcttagtagtggctacttcaaatttccaaggaaaaactttttactaaaatagccatcaagcataaatatttggaaaaatctcaaatatagttctcagaagtaaagcagaatacttatataacacaccagcatctaattataagactaaaactgctagtcaaagatagatgtctccctagatcattgtgtggattctatgacattctcttaaagcttaagaagatgcctgatgttgactctcatgtgcagtaggggatgcaaaatttgaaccatatctgtggaactgtaagggggcaaagttaatgatttatgctgtcaagggaaaaataaagaggattggaagaagtgggagaaggccaaattaagaagcttttgatgtgtgaaggaactgctgcatgtgctgtgttgcatgcactctgttttgttgtatgaatgtgaactaaccaaaacctgtaggacttactgacactttcaaaaggagagatgatagctgtgtgaaatattcgtggaaggaaggctggaaatagtttttgagaccaggtacctattgtagcagtcaaagtgagatgtggaagaacccaatggttgacagtgaaaatgaaggaatggccttgtggaatatttaggttatatttggaagcattctgtggtgacctggagtcacctacttagacttacttacttacttagacctacttagaataattttgaaatttagaacatgactgtgccaacaaggtagtcctcttgttttggtcccaatgcaacctatttttcagtactctggtcaaatcccatgccctgtgatcagccagatggtccaagagggtctcttggcttcggactcatttaatacatttattttcacattgaagcaatttttaccttgttgatacctatggcgttgttcactg

SEQ ID NO: 35670 - DNA, 1179 bp, Mus musculus
ttttttccctgtacccatatcttcgtggtttttctctactttctcctctataagtttcagtgtctctggttttacgtggagttccttaatccacttagatttgaccttagtacaaggagataggaatggatcaattcagattcttctacatgataaccgccatttgtgccagcaccatttgttgaaaatgatgtctttttttccacttttcctgtttttctttaaggacttctacctgtttggttgtgttttcctgttttactttaaggacttgtaactctttagcagtgttctcctgtatttctttaagtgagctattaaagtccttcttgatgtcctctaccattatcatgagatatgcttttaaatctgggtctagcttttcaggtatgttggggtgcccaggactgtctgaggtgggagtgccgggttctgatgatggtgagtggtcttggtttctgttagtaagattctttcgtttgcctttcgccatctggtaatctctggagttggttgttattgttgtctctggttagagcttgttcctctcatgattctgttagcctctatcagcagacctgggagactttctctctcctgagtttcagtggtcagataactctctgcaggtaagctgttctattgcagggaaggtgtacagatatctggcattccaacctgcctcctgtcagaagatgaaggcccgaaatagggcctgaccagaagctgttagcttctgtagtccacactctcacctgagcagactagtcttggagggatccgggaaccaagttggctcccccaggtgctctggcaaagctctcctgggtggggccaacacctctcctctggcagggaagatgcctggatgtctggagctcaaaatggggtctgtcttagaagctgtcctctagggaccttgggggtgtccgccgactcagcgcccaggtgatctggtgctggcactgacaggaagggatttgtgaccctggttaggcaggcttttctgcttctttaatgctgtctcaggtcctgctagagattggattggaacagaagttgtgttccactcactggcggttctaaaattgtgtggagagtccactagggggccttgggggtgtccgctaactcccttgaagtgagttttaaacaaaagactgacttgagaatagaatt

SEQ ID NO: 35671 - DNA, 1326 bp, Mus musculus
gtagatgtgttaatgacagaatgttcattccctcattcaaaaattccttgctccacccctgccccccatttattcctgaagggcattttaattggtttcagggatcttgcttggcagttccttttttaaaagtactttaaaaaaatctccttttccatttccttatggccttaacaattttctgaggataatctgtcacatgaattgcttttgccacataagtaaggtactatttcgcatcggttcagctttgtgactatggatttcttatttctttaagtttaatattctccccttgtgcacattcagttgcctttcttttactaacttgtagttaaattcaacctgaaaatgttccatggcaaggttgagaaataaacaattcatgttttaaaatatagcctgttttgagcagtgtgctattctctccaggatgttaactattcctgcttgtgttatcattgttttgatagtaaattcctttctttttagagatgtatttacttgtttttatttctgtgtatgtgtgcatgaggactcatgtactacatatgctctggtgcccacagagagcagaagagggtattcaatcccctaaaaacgtgtgatatacatagttttgagctgttctgagggaactcaaacctaggtcctttgcaagagcaatcaatacccattttgtcaataatttattttttattcctgttacattccgatcacaaccccccctcccatccatacaaatccctcctccaactaccccttcctaccttgggatatcaaatcccagcagaactaagcatatcctctctcactaaactgctgagccatttccctggcccctaattagttccttttatttgttcaatttataaactatattttaagcatacaaatatgtattgcaaaccagcacagtatatatagagtttatactatgggactaatcagtttcagggatccactggaatgtagctcccgatgaaaagggaggggtgctctaatgagcttcccttttgtcttccctcctcttggaacctgttggcctggaggtttgatgttttgttatccctttccagaagtttctgacattttttttaactcactgcatttttttgttgttattgttcaaatttggtaataaataaggttctgtgtctcccagttcactcatttcttttcctgttgctgccattgtggtactgagcctgtcttttcagtgagtgtttttaacttgatgactgtaagtgttttgactttaaatcttttatgttgttttactttgtatcttctattcttgttctttcctttgtaggacaggaaatc

SEQ ID NO: 35672 - DNA, 1124 bp, Mus musculus
cttgtaccacattttctttatgcattcttcagttgagggacatctaggttgtttccagtttctggctattatgtctaaggctgctatgaacatagtggagcaagtgtccttgtgatatggtggagtatcttttgggtacatggccaggagttctataacttgagatagaactattcccagttttctgagaaacaatctcaggcattattctaactcaatagttctcaacctgtggaccacaaccctctgggggatcacttaccaggtatccttcatataagatgtttacattatgattcataacagtggccagattacagttgaagtatcagtgaaaataatttaatagttgggagtcatcacaatatgaggaactatattaaagagtagcagcatctcttaggaaggttgagagccactgcagtctgacctaaacacacagaatctgtattcattgttctttcccatactctagcgttctcagactagaggacagaacaaacagggcattggagaagccaaaagagggctttggaagattagaagaggacattgaatcccttgtaactccagttacaggtgattatgagctgccacgtgtgtgctgtgaattgaatcttggtcctctagaagagtattctgtgatttttaaccagtgagccttctatctagccaagtttatatttcatgaaccacatatttttttataaagattcaagagaagattaactatttttttaaatttacatacgtgaaaatacttacacaaactcagataaacattgtaccttgaaatgtaatattcacatgacaatttaaggtaaaccccaatatttcatagtaagtctctccagggacagtttgaagtgtgcggttaccctgcaaaggttatcatggccaaactagatgtgttagaatctgttcttttaagttaaatactcatgtagttcattaaatttccatcatgacctgtcaaaacatcactgatacttttctcggttgcccaaaagggttacatgctgttttcttgataatggccaaaatgttaacatgttttgaattcctaacattggtgggtaagaactaagactgacagtgagtgattagccaaggaactgatatct

SEQ ID NO: 35673 - DNA, 1148 bp, Mus musculus
ctaacttttctgcttttgtttcagtttgtgctaaagaaaaaaacacagatagctaggttatataaattatttcttgaataagttgacaaaaggtgaaaggtaataagttatagtaatattactgaatatcttggcaaactctagactctgatatcttttacattctaagaatttatatggcaatggtggaaagaaaatgcaattaaaaaacttataatataaatttaaatcctagatctttgaatgtataaactgtagtcttgaaccatggcttttcaataaggaaaacaagtaataaaagccactgttttgctcttattctcttgttcttgctcctgctccccctctcctccttcccctcccccctctctctccacacactcatggctgaccctcttccctctccctctccctctcctccccctctctctcctcccccctctctccctctctttcttcccatctctccccctctctctcctcccatctctccccctctctctcctcccatctctccccctctctctcctcccatctctccccctctctctccttccatctctccccctctctctcctcccttctccatgccctgaatacactctactatattctaaaaataaaaagacactgttcttacagtcttgttacaagaattaaataaaggttaaaagcacttggtatatgtgtgtgtgtgtgcgtgcacatgtatgcatatatataattgttgatattattgttttgttataaatatcattgtcatttttgttattactattattagttttattatcatttcagtacccaaagaaaatattacatctgattctctgctaactacaaatatggcttcagagaatacagttagagattccctgccttccctcgatttagcaagtgctaccagtggagataaaatagtaactgcccaggttggtgaattactgttatatttgatatcagagaattcaaactgtataactgtctgatataattattgaaactatctttcttctctaggcaaaatatttctttgttcccaacacctgaccacttccatgtctagcttggctactaaatagtttagtgaggttagctagctatttagcttctgatttttagaggcctcactgataaaacagagggaa

SEQ ID NO: 35674 - DNA, 1449 bp, Mus musculus
gccagatgctgttttaataaagtatcatattcaaattttataaagggtcaatcagactgtagaatttataaaggcattacaatctggcttgcctacttcatataaagttattatagatttaaaggtttgttttttcctttgcattctgataattgtaaagagttttgcttcttgtgtgagctataatcaagaagccaagagtttgaatctttcagtatatattgttttctaagtgaaaagtattttattagctaatgcctctcaagggaagtttaattaaaaccttaactctcatcaagctgaccctaagcagagccactttatccttactgtaaacatttatctggttcctgttaatccttttgaagtcattactttgtttcacatcaggtaacttctaagtattttgcctgctgtgacttcctatcccctttattttctgtattctttggcaagaaaaaaaaaaacattattcttatcctccaggccagcagctgctgactactatggggcagggcctttgggcacacagtttcttttttgaggccctgtaattggaatgagtccactttaaatcctttaacgaggatccattagagggcaagtctggtgccagcagctgcggtaatccagctccaatagcgtatattaaagttgctgcagttaaaaagcttgtatttggatcttaggagcagtttgcttctcggcgcccccttgatgctcttagctgagtgtcctgcggggcccgaagtgtttactttgaaaaaattagagtattcaaagcaggcccaagccgcctggataccacagctaagaataatggaataggaccgcggttctattttattggttttcggaactgaggccataattaagaggaaggccaaggtggtggtgtggtggcagctgaaggcggcacggagatgcgggtctcagcagcagattgaaatccagagtccttttcagagtggctccgcacaccatggtggcgggcagccgaggttcggctcgggtggggccaaaaagaacgagagcaaatgagccttctgaggtgcctggtgggtgttaggcccaagatggcgggggctgctacaagacaggttggcggggccgaggtagcgctcacctcaagcacagtttcaaaaacctattaaaactactgtggtgctaataaagaattgtaagatatattcatgtattttggaaaacctataacaaaaattgtgtcttaggaacctgacaaagtgtctgttccttgttccaaacagcaattaatttagttattacagaatattaataattgatctattgcataccatcattttaaataaaattgacaatcaatattccaaagataagttaaaatttgtgtttttttcatgcttctgtatcttctataaattcatacatgcatgcatcccaattattgtgttaaaaagcaacccttct

SEQ ID NO: 35675 - DNA, 1170 bp, Mus musculus
taggcttttgctgcagtggaggtgggacaatctcctcagattcggtttgccgctctaaaagaaattatgctgcgttatgccgtggggtgcgaggctaagcactgcacagaggatagcttgctgttggcatcctgtggaaggcacgtctgattgcatgaaggttcagtgtcctagttcccttcccccaggaaaaacgacacgggagctggccaagacctctctgggtgatgagcctaagggatggttttgtgtagggcccctatgcttgcacactggggatcagacctctaccttcacccatgaggcttgcttgcagcaattaagatctggccataggttaattaacatcctggccttttgatgcacctgccgcaagcaaaacacaatctccccaggagtggcttggcatgattgagaggtagtcagtgataagactccctgggcatgtcaccaacctaagacagggatcaaaccaatgctgtttgtcacccaaggacgggtaaggggcatggctgctgggggctatctacagacattctctctgccagaaaagaaaaaagggggagatgttaggagcaggtgtggcagcagtcctaaaggcgccagggactgtagctaagtcatatgacttgcacctgacttcctcatataagacacaaacatcttgagtgctgcgcaggtgtaccaggatacaggtgaatccaatttggtggagatttgcccctgctgccctgattagctgaagctgcgtgcctggtgaggtggcgtggcctgctgtgcgtggatgggaactgagagtataaaagagtgagaggcccagggttcaggggagatataaacaagggagatataaacaagggagagatataaacaggggagatatagagaaagaagaaacaggactgaataaacgtgtgcagaaggatcctgtagcagcgtcgttcttgctggcgagttgggggcgcgcgcaagagtagtccactgattcctatgtctttctgtgttgctttttaacaattggagaagattgacattccatgtgtgacctctatcaatcatggcctaaactctcagtaagcaaaatgcatgagtggtatttggatacttcgtctttatcccctactatctttttatcttctatttttattttataccaaccccaattcccct

SEQ ID NO: 35676 - DNA, 2161 bp, Mus musculus
atcggagccaccagctaaacgaatcggctcctccaaaatctataaagcctcctgagtggcctagtccacaaccttccccttatccacagcctcgacccccactaatggggaaccctgaacccctcagggtaccaggaggaggactgctgtgagtacatggagccacagagcacagagtctgggcagactctggtggacccgcccaaactttaaacccttcagtactcgtcattttcctctgctggtatttataactggaaaactaaccacccccattctcaggatcccctacgcctcacagggttggtggagttccttatgttctctcatcagcctacttgggatgactgtcaacagcggttgcagatgctcttaacaaccgaagagcaagagagaattctgttagaggctagaaaaatagcccggaagccaactgcggtctacacagctacaaaatgagatggacatgggattccctttgactcgccccagttgggactgcaacatggctaaaggtagggagagcttaaaaatctatgaccaggctctggtctccaaggtgcctcaaaacgggcccactaatttgtctaaggtaagaggtaatgcaggggcggatcgaacctccctcaatgttccttaaaaggcttataaaagccttcaggcggttcactccctttgatcttacctcagaagcccaggaaagaaacttcagaaattagaaggtgtattacaagagggagacagttactcgatctagtgaaagaggcagagaaaatgtgtgtgtgtaaaagagagaggcgggaggcaaaaaaaaaaaaaaaaaacaggagagatcgtagacaagagagaaatttgactaaaatcttggacgcagtgataaggggaaaaaaaaaagacaggatctagacaggaaacctgggtaactgaagacaagcctcagctaaagaggctcagctgtgttagactcaagttacttatttgagatacacccttcgaggtggaaagcagtggctaaaaaaagccagcaaaagactgtaactcagattcccaccccagctacaccaaggcaagtaagaaaattcttgtgcactgctggcttctacagactctagatacctgggttggcgaccttagctgcccagttgtatcccctaaccaaggaaagagaggtttttgtgtggaccccagatcaccaaaaagcctttaaagaaattaatccttactcagactttgggactttgaaaaaggccagtggcttacctatccaagaagttacaccctgttgccagcaggtggttttcttgcctgaaagctattgctgccataaaactgcttgtcaaggacgctgataagctcactctgggacagcaaatagctgtaatggcaccccacactcttgaaagacctatctaaaagctccctgactgatggatgacgaccaacgctcctgcgacacattatcagagcattttgttgactgaatgagtgactttcgcttcattccacctgctgtcccactgtgtgagactgcacctactcatcactgcgctgacattctgacagaagaaatgatctgaaggatcagatcagccttagcctgagggcagtagcctcgcggttaaaggtaagcagaaggcggggacagcagtactgtggtgaacaaaaagcaagtgatctaggccagcagcctccctaaagggatgtcggcccagaaagctgaacttgtgactttgagacaagctctataaatggcaaaagaaaagtctacagtgacagcagatatgcttttgccactgtacgggacaatatacaaagagggctgttgacatctgcagaaaaagacctaagatgctgtggctaaaaaaaaaaaaatccatggggtggttcacagtatgacagtaggtgtttactattggcttggtctatgagatcggggatatctcatctacatgtgagaaggattggggtgctgtatctatatgactgaaagccacaaacctctctaaagcaagagtgtggctatatgacagggtcctggtccggaagcaggcaaagcttctactgtcccttcagggtccccagggctttaaaccttagctcaaccttaccaggcttcctctcactgcccacagccacactctattccagcttggttcttgtg

SEQ ID NO: 35677 - DNA, 1286 bp, Mus musculus
acaccagatgagtttcctacagacattccggggaccaaagggaacttcaagttagtcaggcatgtttcctttgttgactgtcctggccatgatattttgatggctacgatgctgaacggtgcagcagtgatggatgcggcccttctgttgatagctggtaacgaatcatgccctcagccccagacttccgaacacctggctgccatagaaatcatgaaactcaagcatattttgatcttacagaataaaattgatctggtaaaagaaagtcaggctaaggaacaatatgagcaaatcctcgcatttgtgcaaggaaccgtagcagaaggggcaccaattattccaatttctgctcaactgaagtacaatattgaagttgtctgtgagtatatagtgaagaaaataccagtgcccccaagagactttacttcagagccccgtctcattgtcatcaggtcatttgatgtcaacaaacctggctgtgaagtcgatgaccttaagggaggtgtagctggtggtagtatcctaaaaggagtgttaaaggtaggccaggagatagaagtgagacccggtattgtctccaaagacagtgaaggaaaactcatgtgtaaaccaatcttttccaaaattgtgtcactttttgcggaacataatgatcttcaatatgctgccccgggtggtctcattggagttggaacaaagatcgaccccaccttgtgccgagctgacagaatggtgggacaagtgctcggtgcagttggagctttacctgaaatattcaccgaactggagatttcctatttcctgcttagacgtcttctgggtgtacgtactgaaggagacaagaaagcagcaaaggtccaaaagctgtctaagaatgaagtgcttatggtcaacataggctccctgtcgacaggaggaagagttagtgcagtcaaggctgatttgggcaaaattgttttgaccaatcccgtgtgcacagaagtaggagaaaaaattgcccttagcagaagagttgagaaacactggcgtttaattggttggggtcagataagaagaggagtgaccattaagccaactgtagatgatgactgaagacttcaagttaaacaatgccttgggaaggagttggaatttcttttactagcctaggggtatattttcaaagcaatactagaaagaattaatttcctagctcattaccttactagtagcagctataaatttattcttatattttggcgatgaaaatgtgacctctacttttttttttctttttattgatt

SEQ ID NO: 35678 - DNA, 1854 bp, Mus musculus
tatgcttatgcactggagggcaggactgtgggtggcatggaggtctacaagaccttgtgttcctcttctcatgccgtgctgccttgctttaatttgatttttatgagtcctaggcataagacaaggtttggccatcaagctaggatgaacaaaggactgccatctgctctgcccctgataaagaacaataccaccaataaggggtctctgctggttgctggggttgtaacctacttctaatatggggcttaaaattaaatgtgaaaagtggtatactatatacattggatcaagtctatatagtagctaaaattaagcattccaaagtaatgtctaatttatcaatcaatgaaagtttgaagtgaaacttggctgcaaccagtctttggcgtagcacttgtatcatgaacctgtctaagatgaaaatgatctcttctcatgattcatctgtgagtagctccatagtgaagggcaattagtaaaggctaaagacttacccctttatttgtccttctatttggggttctgttgtctgaaatttgaaggaatacgaccagtgggctcaaatgagcaccactcttagaagttgtgtgcccattcccttaacacaggtagatctgtcttacccgtttcctgggtgggaccttaggaatccagtgccctgagactatgtctttattatttatgcctagtatctcagtcttcccacactggcaaagagtatagcaactggtggttagtgataattgacaaggttctgtccaggctgcttttttgaggtctttgttttagtaagctatgaatggagctgtctcttgcatgatgaataaacactctaccattgtctccactgcccctagctgtagtactggctgataggattatggtggaaattgtgttattggtaatctttgagccttgagagaggtagaaattgttcagaaactgtgtcctctggtttctaaatctattccccacgtgcctccaattttcttgtgctgtgcattttaaattaatcatgttttttcttaattaaatactctttcacagcaatgatttccaactctggctgacgtaagaattgctggggaagtttgaaggggggaaaaagaaagctctggggtggagtccaggctttgatagttttttttgtttgtttgtttgttttttttttttttttgaggaaacctattgatatatgtatttgattgactctaaaaagttgttgtattggaacatgaagaaaacatttaaataaaacaagattctgaaacaaaaaaaaaaaaaaaaaaaaaaaaaaaaaaaaaacattttaaccataatagccacaaaaatatctagtataaacccaagggtataaaaaaatctgtatagtgaaaattataaaatatgaaatgatctcttatattcatgattgcaagaattaagtgatgaattatctacattgtccaaagtgacctatagattcgatgtaatatacaatgaaagaccaataatattactcacagaactagaaaaatatcataaagaagtataaaatattctgaatagctaaagctatcttgaggtacaaaagcaaaactggaagcattacaaaatctattacaccaaaatgtttaaatgggtaacatagagctttagtaatcaaaagaagatattagcaaaaacagtcaataaagagaataatgaggataaagttttaaatgagaagagggaatatatatatatatatttcatatataaatttcatatacatatacatatatgtacacacatacatacacacacacacacacacacatatatatatggaggagtttaattggggttactctacacaggaaaaatgcctct

SEQ ID NO: 35679 - DNA, 1165 bp, Mus musculus
tcatcactgctctgacattctggcagaagatcagatcagccttggcctgagggcagtagcctcgccgttgaaggtaagcagaaggcggggacagcagtgcggtggtgaacagaaagcaagtgatgtaggccaccagcctccctaaagagatgtcggcccagaaagctgaactggtgactttaagacaagctctataaatagcaaaagaaaagtctacactaacaacaggtatgcttttgccactgtacggggcaatatacaaagagggctgttgacatctggaaaaaaagacctaagatgctgtggctaaaaaaaaaaaaaatcaggtggcagatctaaccaccaacaggtgaccccaaggagcaatgatcctggcagtcaaggagcctaaagattattatgacatcagagagatcagctttagacacactgctgagcactatcaagttatggacagtatttgacttggcctgggggccaagaaattcaaaggtgtggttaggtcctttaactactatgttacaggactctctgacttggcagaagaaatagtcaaaagctgcaaggactgtgctatgatgaggtggaatttctaaaagaaatcttcccaaggtaatggacctgcctttgttgcccaggtaaaccagggactggccaagatattagagatcggttagaagttacattgtacatggaggccccatagctcaagacaggtagagagaatgaatagaaccattaagagacccttaccaaattgacagcagagactggcgctatgattagatagctctcctacactttatgctcttcagggatagaaacacccctggacagtttagactgactcccctccacccctccagaggtaaaaatagccactgtgcatagtgctgacatgctgctttcccagcctttgttctctaggctcaaggtgctccagtgagtgagacagtgagcaaaaaagcagctccagaaggcctactcaagagaagaaggcctgctacattagacgtctccacgcagaaaaccttaagactcatgtaaaaaggcccttatcttgtactcttaaccaccctactttctacctttatgggaccccttttgattttgcttctgcttttaattataggtccatgtgtgttaaataggcaagtcaccttta

SEQ ID NO: 35680 - DNA, 1165 bp, Mus musculus; identical to SEQ ID NO: 35679

SEQ ID NO: 35681 - DNA, 1165 bp, Mus musculus; identical to SEQ ID NO: 35679

SEQ ID NO: 35682 - DNA, 1165 bp, Mus musculus; identical to SEQ ID NO: 35679

SEQ ID NO: 35683 - DNA, 1282 bp, Mus musculus
aaccagcagccatacttcctgctcttggggaacaggacaaacactgaccctgactgaagtaaccgtgaggagtccagatctctgtataggcaccccaccttccacccacaaacacctatgcagacaaattcagtcggtgtccaggacagaagctatttactatcttgtaccttccccagttggctggtgggcttgcaatacaggacttactccctgtgtatcaactaaggtttttaattcatctaatgatttttgtgtcatgatccagctgttaccccgtgtatattatcaccctgcatccagtttagaagaaagctatgctggccagcggtcaaaaagagaaccaattactttaaccctggctgcattcatgggaataggtatggcagtaggagtggggatgggagtgtcagctttgatagaaggaagacagggaattcagtctttgagggatgctgtcaatgaagacctagcgccaatagagaagtccattgatgctttagaaaaatctttgacctccctgtctgaggtagttttgcagaacaggagaggtcttgatttgttgttcctaaaggaaggaggactgtgtgttgcccttaaagaagagtgctgcttctatgcagatcatacaggaatagttagagactctatgcagaaactgagaaaaagattagagcgaaggaaacaggaacgggatgcttaacggaggtggtttgagtcgtggtttgagtcatgaccatcttggataacttttttgatttccactgtagccggaccagtccttatgatatgcttagctttagtttttggcccctgtataataaatagagaaatggctttcatccagagtagaatcaatacagtaaaactcatggttcttcaaaggcaatatcaacatatagttcaggtagatgaacacttaggggacaccaatctctaaaattctatgattagaattagtctaaacagaagaagaggggaatgaaaggaaataaaacttgagacctgtgattcatgtaatgtatgtcaaatagcccaaagagttgtttgtgaactttgaaacgtgggcctgagaacatagcagaacaggccaggacattcccaggcaggcccgtctttacatgtctggactggcccggcacctccctatctcccacccctctgacctaagttaaatcttaacaggctgctgatgtttaaatggaccaatcatgtgaaatcgtgccaattcctgcaccagccccactccttttctataaaaccccctagcttccaagcctta

SEQ ID NO: 35684 - DNA, 1152 bp, Mus musculus
aataattaacattggaacaaaagagtcagtgagatggcccagttggtaaaggttcttgttacccaagccgagcaacctaagttggatccctgaaaccaatttaaaggaggaaggagagcactgactccatacagttgtcctctggcctccacacttgcacagcatcacactactcccacacatgtaatgattcttaaaacttgggatgaaagaaactgtgttggccagtggccagctatcaaaggaaaactgggacttcttgggaaattgcagccaacaaaactgtcctaacgtatgaacttattgttattctataaattctaacatagtagaaagacataaatatgtccatctatgtttctggcataatgagatctcaacaaatctctactcctttataataaggcacatatatatgtaagctgcatttgcttacctttaataccttcccagaagtcattacgatctctcctgactgaagtaaacttgcttaggtcatggtacgtactccagatataaacatatttatcttctaaaccgctaaagaggtaagtagagtcatgactgtatttgagcaggaaaggtcaaaaaataaacagaaaaaaaattaaggtttccttctatcagtgctaatttaagatatccacagtaacacctgagtaagattgttgagaattaaatccttattctggattctgaatttggtttgatgcatagccaggctgttttgatgtttgcttattgctacacatttgttagaacactgttataatgaatatactctctcggagataaccaggataatcttttcagacataggggtgttacctattgtttacattttggagattcttaatgctgtggacccagcctagagccttatcatgctaaccaaaactctattagccttagaattttcatcaaagccctggtaactgtgatgttggttaatccattctagaactagtgacttaaaggagagcagatgaagccaattaaatggctgggtaattactgggtacttcaagaagaaaataatgaatttttgagaagagttgaaagaacgattaggaagaagaaaagctaggcagctaatcttatttctggagactttacagatcctaaattaggagttcagatgacaagcaaagc

SEQ ID NO: 35685 - DNA, 1142 bp, Mus musculus
ttcagaaacacatatggttcaattgctcagacattttgtgtgttttattttattatggtaacacatcataaggtctataatttcaaaagaaacttccattattttgtagtgaaaatttgcacctgcaccaagttacctttttaaaagtgattcgccatgagctaattggaagcataaattttctctcattgctttcccggataccaataaaaacttgcagcgaaagctaaaattgcagccacaggagggaaaatgcagtgggtttcttcgcagagtttgaatttgtccaaattatgatgtgttatatttggcaaatcattcagtgttgagaatgaaatcacaacccatgtctggtgtaaagggtaaaatcagcactcactatgtccttttagggttcttaaagttgtttaactttttgtcaccaactaagaattctgttttgaaatcattctttgcaaacacagcccgtgtatttctagaaatgcaggaacgtgttaatgactgttaagttacatgcttatttgtgtcctaccatagattgtattacctcttcatatgtgcccctgaagccttttgaaaagaattgtcagaatattactgtggaggttgaagagtttgttccagaaatgacaaaatattgttatccattcactatttacaaaaatcatctgtatgtatatcccttgcaattaaaatatgacagccagaaatcgtttgccaaggtaagaaaagtatacattcttggagcgtgccatattattgatcatctgctcactgcgtgactcactttggctgattaatgattttaggctaggaacattgctgtctgtgtggaattccgggattcggatgaaagtgacgcgtctgcgctaaaggtttgtttatggtggtgatctgtgtgtctttttggaaaagattgtggagatgaaaatttagtacttgatggtgtcatgctgtaagcttaatgtctttgtatttcaacaagaaaatatgctggagtggcaaagataatatttcatttcctactattacatgtgaactaaagggtttgtttaaatgatctatagtcaaaggtagtgtagatatgagctgagaagatgggcaaatgtgggctggggatgtttatctatatgatggtcctg

SEQ ID NO: 35686 - DNA, 1199 bp, Mus musculus
tgtagtgcaggaagtttcctctaaatgatttgcatctgtatcctcacagattcagttcttcctatgtttcatatcaggctcaattatccatagaatccctatatgttatatggaaattaacacacaaatgatcaagaagtactagactccagtttacataaagtcagatatgatgccaaggtatcctgcttctatattttcagctattctatactccttcctatgatgtcttacattaatattctgtgactttacaagaaaacccaaaatatgctcatcttctaattttttactggtatgaaatttgtgcctaaaagtttcatgtatttcctcagaaccttgcacagaataagcacttgaatagtctcaagggaagaagtctatgttatagaaactgatttaactcccttggagcccttttataatgagcaaaatgatatagacagagaacctagccctcagcgaggttgttcttgaaagagatagaaaatattatttctgtaaaacataacatattgcagtcccaagaaatagtagacggtagtggtggcacacgccagtagtatttgctgaaggaggcagaggcaggaggatcacgaattcgaggccagcctgggctacacatttaaagaggcagtggtggtgcacgcctttgatcccagcacttgggaggcagaggcaggcggatttctgagttcgaagctagcctggtctacagagtgagttccaggacagccggggatatacagagaaaccctgtcttgaaaaaaaaaaataatagtaaataactaccgtaaacgtgctgagtaaaccctaggggcatgcatacacacacatgcatatatatatatcacacacacacacacacacacacacatatatatatatcataacattctctatggagttttagctttggaaatacagtatttgggagaaaaaaaattttttcaactctcccagtaggttaaactttcttgtcatttgtctcatttctaattagaactgtcgatcaccacagtagcctctggatagatttcattaaagccctgtgattgtagatggcacagtttgattgatgtggagcacttaaggaaactcatccccaaacctctgctgcccagggctttggctggcctctttcatttgaagattgtggcaattttcagtgtagggtagctgtgtcagaattcccgact

SEQ ID NO: 35687 - DNA, 1184 bp, Mus musculus
ttatttagttaaaaaacatcaggctttcccaagcagctgcggaagatggaggagaggcaggttctggtattggatggcctaggcaatcttctgggccgcctggcggccattgtggccaagcaggtgcgtctgggccagaaggtggtgatcatacgctgtgaaagcatcaacatttctggaaatttctacagaaacaagttaaagtatctggcctttctctggaagcggatgaataccaaccccgcctgaggcccctaccacttccgaacccccagccgcattttctggcgcactgtgcgaggcatgctgccccacaagacggagagaggccaggctgccctggaacgcctcaaggtgttggatgggatccctccaccctatgacaagtaaaagcagatggtggtccctgctgccctcaaggttgttcggctgaagcctatcagaaagtttgcttacctggggcatctggctcatgaggtcaggtggaagtaccaggcagtgacagccactctggaggagaaacagaaggaaaagtccaagatgcactatcggaagaagaagcagctcttgaggttacggaaacaggcagaaaagaatgtggagaagaaaatctgcaagttcacagaggtcctcatgaccagtggactcctggtgtgaacccaatatagactgtgccatagatagatagatagatagatagatagatagatagatagatagatagaaaaaactcaagggagtgctggagcaatggctcagtggttaagcacactgactgcttttccagaggacccaagttcaattcccagcactcacatgacagctcactaccatctctaacttcagttccaggggatcctctgacattcaagagcacctgcacttacatgcacatgcacataattttaaaataaattggcaagttgtggtggtgtgcgcctttaatcccagcactcaggaggcagaagaagggttcgctgtcagcctggtctacataatgagtttcagggaaccagggttacatggagagaccctgtctaaaaaaaataataaactaaatgtaccatattttcttcagctgagggacatctgcgttgtttccagtgtctggctattaccaataaagctgctatgaacaaagtggagttgggtcctggcctgggtcccatagacacgcttagcat

SEQ ID NO: 35688 - DNA, 1389 bp, Mus musculus
gacatattcaagatcagagagatgaattacaggtgtctttttattacagtctactactataggtatttatttcaggcaatctaattagaaaagtattaatttctccccagtgcagttagggaagagattaatatttacctgtattttcagaggggatggctttcaatttggcgtgcctctcccctatcttctgagttctgaagtttaaaacctgtaccaatgtgtgctggaatacttgagagactgttcttaaagtgtgaagaaactggataggttagaaccccttttaaattactataaaagatccagagaatgaatccatggttttatgtaaacactgccttccctcctggtaaagatgggccaaagatttcaatgcagggggagaaaagacagtgaagagatgggagtaagtttctgagcttagtgctagtctgagtccttcggtgtcagagaaacctgaaaaatggagtgtgggagtgttatagtggcagaggagaaaatgagagttaggaaaagtgaattgtcagattttgtttctcatgcaaactactcccaggtgattttggacaactatggtgtgttattcacgtgtaggctctccattctgttaacaagagagggggttcgaagaaggagagagattgcttcaaggatcagtctaggttcttctataaccaccagaaacatggaagaggtggggcttgtgtgtgtgagagagatggtctctaaatgctataaaagagactcatggaagcagaaagcaacttatcactgacaacttgcttgatggaggcggtgttgtcagagcattgccaggtctgtttggaataatctgggctggtgaagaatgatgcaagtgtagggaatgtaaataaagaagtagatactatccaagttaagtctagagggctcggaaagcaggacattaagaggatttttccctggcacctgatacccagccagccatgtgattatagtgaagtcctagtatgactgcttcctattctatagtgcaaacacaacaaagaagagcagaagcttctccacttacgacatatgttactttggcaagtaatttagcttccgttgagtcccagttttcttatatatatgaaatggtacttgtgctcacatcagcagtacatatactaaaattagaatgaaacagagattagcatggccccttcacaaggattgtaggcaaatttggatagtgttctatatattttactaaaagatgaaattgtagtgatattaatagtatataggcttgctaggaacattaaacgggacatgtaagaaattacttaacagtaccttgatgttgggagctatttggtgaactataactattatcagccatgttgcagaatatcatcagtggtc

SEQ ID NO: 35689 - DNA, 2213 bp, Mus musculus
tgttcagtgagtggccaagcttgattctgtaccaacaatgtgacagatgtttgaacattttgtgttatgtatgtttcactcagtaggcatggcaaaacccctaagagctcaaaatgaggagttccaggtgaagtcaaatgaagccgtccaacacatctcttactaatccagggggaaagtggatttttggcttcttgatacaattcctttgataagagaatacccaagaacagatggagatctttgctaggctaaatagcactttcctctgagcctggatctagattgggttgttctccagcaattatagtaacggcaggatactaggctttgactttctttgggatgtacataagtgggctaatccatcgaacttgaccacttttaacacctgtggataggttctgtttctaagctcagacatgagacgtacagagataaaaactatatctgagttggaaggataagagtcctccttgtagacagtgccactttattgggttagtctttctttctatcttgaattcatgactgacccagaccttgtagattattctctctctctctcttgtctgtgtgtgtgtgtgtgtgtgtgtgtgttcatgtgtgcacacacacaaagagaccctaggtagcaagcagactttatgcctttctgctttgtaccgtactattgctgctagctaaaaaccagcaaaatgtagaaagtgaaaactgaagaaactactttgcagtggataattttaagaaaaaaaaaagatgcttgctcctcatttaggggagcagagaactattccaatagcatgccttttctgaaggccacgtgcttcgagttccgtgctgcctcagtagcgggattgagttgtgatggcgcacgtggcactgccacctctgcctgtggagctgccctgggttcagataatcccctgtgagtagccacagaagcctcagaactcctatggctgggtcactgcacccctgtcaacaagttgtgtcctgttgatagactgcgaccccctggagcctgcattccctgtgccaactccattttcagcatgtgaattttagccatagattcatccctgagttcccagcttgtggactgtgtgtccgtttcaactcctcaaggtagaaatgggcaggctgcaagcccattcttgggtctagggaatgaggtttagattctggatagaagacagctctgaaaagcatatgcttggctttctggcatttctaatgttcagcgggcaggaatgcaaaggagccatgcacagtgtacacattcaattccttttagaacgataggtcccattcagtctactgctttactacttaatagtctggattgtgcacatccagtgatgaaatgaagaacttttcacttacaagtgggtgtttccaaacatgttaaaataacctccagagagaagtgcctggaaccactgttcctggtgtcactttaaagctttttgcttcatgactctagcatttaaaacctgtttgcagccacaaatgtgattaacagaagtttacaaagcaacactgtaccttatgcattatcttaaaatctgtggacattcatctattgttcaagcaatgatgacaaccagtgagataaaaagagagtagatagttcagcatggcaccattggctgttgttagactagtttcattggtgtatgctgtcctttgtaatgtcaggactaaaatatctagcaagccacataaacggtggcaagtgtgtatattgtttggtttccatttgtttgttaaacagccattttacttttccatggtcatgagttgaagggaaattaagataacgctccctccccaccaacactattcaactacctctctatgcctgatttctttaaaagggttcccttcttctaaatctgcacaaaaatagttccagctcatctacgttgtaatcgcgatgtgatatagatggtctctgtgaaaaaaaaattgttcattaaacagaaatttcctgttgtctgtgtctaccaaagtgtattctatcttggaaaaacaattaattggctgggatggacctgttggtataggactactgtcccagctactgggagactgaagcacggggattacgagctcactgccaacccagacaatgaagtccctgtctgccaaaaactaaaaagtgggcttaattgtgcaggcctgccatcctcactgctttggaagctgga

SEQ ID NO: 35690 - DNA, 1111 bp, Mus musculus
tggactatggtaacatggtgagatggtcagaaacaccatatttagtgtatgatagagtggggagactgggaggtggaaaaaataaaatgaaatgaaacgggggtgggagggaggagtggaagggtcctgagaaacaatagggtaaggctgtgaagcccgatgggtggggggatttcaggaaaagccaaccaaggggaaaacaagagatggacaactccccagaaatgaggcttttccaaactggattgcctatcacaatcacctgatgcttatgaaaaatacagattcttggcctgaccatccatagccacacttagatctctggggcaggggagagggctaaaaagatctacattttactcctctgctgtagggaaatggggaatcagccagatttagaaagccctgctttctagaacatttagagaggaagaagaggctttagctctcccaatatggattcctctaagcaccaggaactcggggctggggggtgggtatgttcacatgctcattggtctgagagggaagactagccagcactaatccaaaccagacatacccactctgttacgtctcagagtccagccaatcaaaagcacatgtgccaaaggctttttagtgaactctcactcttcctttctgctttcagacattttagaaaattacgttctgtaggcatgtgactgcaaaataataggaaaactacatattgtttgtcactgtagtcacacattatccataaacaatggtgtaattacccataattattaagctaaaccataaggtaatcaacacaaatgcacgaggcctcgtcatctggttgtatttgcaaagtcatcacatggggatcctccgtgctttcagagagcacagctggagtcaagctgtctccattctaaccaggtaggttacagtttgcagagtcatcctgccggatatcgatgtgtgtactggaacagctacaactaggagtcaacctgcactctacattctagcctcgctgttgtccctgaccagctgtgtgatctggtgcaacgccctatggtctcaaggccttagttttccctctgggaacataaaaagacaagcacgcccccagtgtgaggag

SEQ ID NO: 35691 - DNA, 1833 bp, Mus musculus
acctgacatggtttgctgctttatattttaacaaaactcttaattccatttttggcaaagagtatgatataatccctttatatctatcaagaagcctaagacattgcggagtatattgtgtggaccgctcataaatgctttaaaatgaaatgtagtgattctgttgtaaagcatgagagtgactgattgtgtggtggtttttttcttctacttccagtcaagtatcatcacgtgggaaaactgctgaaggaaggggaggagcctactgtgtactcagatgatgaagaaccaaaagacgagacagctcggaagaatgaatgaagcattcggtggagcatatctatttttgtattttgcaaaatcatttgtaacattccagtctgtctttacaacatggtgatttcaatatttagaaaagttttgaacttgctgtaaattttttaagtaacatcactagtgacaccgataaaatcaactcgtcttagaatgcatgatgtgtttgtatgtcacaaatccagaaagtgaagttcagtgctgtaatgcaaatggtaaagctatttctcttctatctgtagttagaacaaactgaattacaatttgattttcctgagagagggaaaacttgggtatttccacatactggtcaaaatggtaagtgcacacacactggtcaaaatggtaaatgtcctaagaatgaagaaggatcagcgtgtagccatgctgtattctaaaacaagcccattttacccaactgacttaactgcatgatttttgttttatctacccctaaagcaaatctgcagtattccaaaatctatggtattgattcaaaacagaagtccagtaacaaaatgaaacctcaatactgaactcagttagggcaaacccattgcctgtgttcgtggactgatttatcatccatgtctgcatgtggacactctcccacacacagtaactctcacacacatggtcattgacagttggaactaaaacagcatcggaaaatccaaaggagaactttgcaaaagaaaattctcttgcttgtagcagggtgatggttatgtggttattgaccagctgtaaaatttgagaggaattacagggcaggaacaggtatgtgcttttccaaaagccttcactgacatctctgaagaatgagaaaacactacatggcactagctgggtgagtttgaaaggacaatacattcattcctaaggtaacacttaaatccttctgttgttacaagcttgtagtcacttcaaaagtagtcgtcaggtgtctaggtcttgggtaatactcctttggttaatactaaacctagcttaagtagactctacagttgtgtaaatttgtaaaagtattatctgaacaactagtgaggtttcaaactcttgtaattgtagttaaatagtcattgtattttcttgtgagctgtgtttaatggttttacctcaaatcagaaaaaaaaatgaagtgcttgggtcagttaataaaaaggttttacccaatatagtgaggctttcattttttaaacctaagagccggggggtggggtggggggtgggagtagctatgccatagctgattctggtcatgtcatggctagtgtactcatgaactcacagcaagatcaagccagccgacattcaagcaccaactgaagaggcgttcataatcccaagccactgaggagctattgggagctgatcgcaactaaggtagggatagtcagttttctttggaagggcttctagtaggttcctcgtgcctcagtaccttgtacctgtgtgcacatacaggcagcactaattcgatgtgctggggtagttttc

SEQ ID NO: 35692 - DNA, 2159 bp, Mus musculus
tatgttgttagcaaccacagtgcaagacctagaagagggttcaagtgcaaaagcttgctcctcttgccaaagttccaagtgtggatcagagtaactgcaggtatgtcagcaagctttggaaatagaaaacctgtaaattctaaagcttggtgaaacaccgtaattacaaaacttcttgatccaaggacagattttacattaagctttaatttggtgccagtaaaggagcagattagcattaagatggctgacttagccttcgatggctcttttgctgtcataacatcattcatcatctatcttcaaagaggacaatagtggacaaataggcatcttttgatgtgttcgtagattgggtcagaagcaccatgtatggtaacaaactttgctaaattttactccataataattttagataaagaagaaatccagaggttagaacatataatagattttatgactagaatttcatgaatattcactggaaggaaatgaatatattcataatactcaaagggtcatttatgtactgacagttctagaagaagaatctaaaagggctgattgccctttgacagctaagtagctgggactgtttggagttttcttgtttgttttatggaccccatatgtttccatcaaagcaccaggatcgaatttataaaatcagggggatttgcaaaggaaatatcaaaacatcctggcacatcaataatggcacttgggaagaaaagttgtgacagtattctatttcaggctctgtaatcctttcactcagggttgggtgacatcagtttgtaaaaagtcactgactatcccccacactgacttttatagaatagtaacaagtgcctccttcgtccttaacaaagtcatggtgttagaaagacttaagaaaagtccacagttttctagctgtggaaaaattgtttgtgtgtggaatttgtaagcgatgttaaataagtgatttatcttttttgctgactcgttttggacttcttaaatgtgtttttaaattgagatatttgtagattcctgaagacttaccccttagcacagtgcatgctctgtagaaagcttggccaactctttctgccttacattggattcaggacctcagggcagttagttgaccttcattttcccaacaaagctatacccgacctggcaactggctatcagtgaatttagagaccatctgcaacaagaatagttgtttcgaatccgcagaattggtgaagggtagcattttcatgacaatttcagttcagtctcaatttgacattctacaggaaagcatctgctagcagatgcaggtaggatgtcagtctgtggggttacttactatccttactatcgtgtcacacactgagtgcccctaaactgcctcttgagcagcctggtgtctgcagtggttgtgactatggtgtacctaaaggagaagccacaggttgtttctctgatctgcgtattcctctttgaagagagattgttcagtcacttcaaagttcagaaaggagtgaaacagatccacatggattactaagaaagaaacaacctcactttgaagccagtggttggtttcactattaaaactgggtttgacttactgaatctgaaagactgcacatgtggtgagagtgccttttttgttttgtttttgaggacgagcaatgactattcatgttcaaagtaatgttgcccaaagtagcctttgaaagcactaacagctcatatcttgtcagagagttttctggcaacacattactctcctccaattaaaaagctgcctcctttccctcccccacatgttattctattgaaacaaaaaacattatgggtttgtaatagaaagcagctgactgttttgaaacaaacaaacgaaaaaaaaaacccactcagtttcttccctcatttgatgttgtttctcgagagattttaggtatttttgctcggtaagaaaagacaataaaattgcagatctcagcagcatgtgcaaaggttgggatttctccctgtgatagacgtggtgctaagtcatcttgattcagcactttcgcgctgtttctttgctaaatgctttcctggggcctccaagtaacaatactgcttttgctgaaccctggagttttgtacccgtctgtggtaatgcattgtag

SEQ ID NO: 35693 - DNA, 1229 bp, Mus musculus
atgaaacagatgaatttattgactacctattaaactattatcagactccagagtatgcccgattctgtcttgaagcaagtcacctaacaagcacatgtcagtggcagagagatgtctacgctaagggggatggctttcagatctatttaagaaaacaggggtaccactcaaacagcctgagtgaagaggagagcctgcaagggatagagcaggacgaagagcaggactggccacaagtgtatattaaagatcctgagagtaagtcgcaaaagacaggcaagatcaattatgccaaagaatttacaaagaaattaaaaaaccattgcaaggacatagcaagtgaaactgatgagcacctgtctccaactgatggagagagctatcctgtggaaaagattcacagtcacggagtcaaagattctcaacacataagaaaaagcccagtttcctcatcattaaggtcagtagatgtaggtttgccattggcagacttcttggaggaaattagtagcgattctgagtgcttcagtgaaactcttagcatgaaccaagaggaggaggaaaggtctatggctgtctataatagctccccggaaaaaagacctcttggtactgacaaaatcagtacttgcaaacagaaaacgaagtcgagtcagcagaccttgtgttcagagtggaaacatgacaatgagggaaaatactctaaacacagagttagggcaccaggtaaaaggtccaagtctgaactgagatactcgtggcttgaggaggaaggtgattccattagagttgacaagaacataagcaaaactagggggaaactagccccgaaacacatgcttgatgaaggccagtaccatgagtccagttccagtgatgaattagaaagcaccacgaggaagaagaggagacttactagcggtatgtttgaccagaatgtgaaatacaggccccttcatatgccatcaatgccgccaaaacgggctagagcattctatttgggatatttctccaggaaaaggcagactccgtggaagtcagaatataaccaggatgtaagaaggttcaaaagatatgaaaattctgaagattacacgcttgattctgataattactatgtcagtcacgatgacaaccaggagcacattgagtatggaagctacttaggagacagctactctagttctttgtattttaaaatgttctgacggccactttgagcaggaaca

SEQ ID NO: 35694 - DNA, 1100 bp, Mus musculus
atcctccaaagtgtttagagcactgtacactttctaagagaacaaaggtgggggcagtttttctttcccttcactttaataacaaaattgccccccccccccaagcctctatcttgcctaatggatgtccagacattcacgtgctctcacaaagcatcctttactgctaaggccatgccactgacttgggcagaagtgagttctcaaagggaccagacatcagggagactgcaacaaaggccagactcagtctccctcacctctctgagagctcagcacttaacactgtacgtgcggacaggtgagtggtctcttaggaaaccatcctttttctcactaagtatagatgctgtgccaaccaggagagactaaagtaggcagaaccattaaacttggctagcatcttctactagtggctgggacaacaatttccttactttcctggagtcttggtgctgttccttcccgggcactaaggactttctttccagtcctctgatcagccagataagtctgtagctaaccaaaggatcgtggctgaggaatggttgcttgggcaacttcttcttacagtagagctcattaaagctgccaatggggcttccaatgacaggctgcttccaagctctgggatactatagttttcgtgagatttttttttctcctgctttaatttgaggtaaacagcttctggccaaaaccaggcttactaaagtccaaacatttgtgtttccttccactttctgtgttgaaatcctgaccccatgtaatgtttcaggaggtggagcctttggaagataataagatcacgaggccagagccctcaggaatgggattagtgtccaaacagacatgtcaggagctgccctgcttctacgacggaaggatacaacaagaatgtgccatctagaggcaggtggatttccgagtttgaagccagcctggtctacagagtgagttccaggacagccagtctatacagagaaactctgtctcagaaaaaaaaaaaaaaaaaaaaaaaaaaaaagaatatgccatctaggaatagaaagtgagcattccccagatatcaaatttgccttgaccttgaacgtcccagc

SEQ ID NO: 35695 - DNA, 2804 bp, Mus musculus
ctatgcaggtcccaccctaatgcttctgaacctgatctggaaggaatgacctttcttcctggtctaaaggtcataggtacgcttgagggtgcctcactcacagaagtcgagacttactacttctgatggtgctgctcaattcttaaacacttcccctacgccccccagtagtgtcagcagttagaattgtccagctcatgtgattctgaaagctagatttggagaaaggggaacgaaccttaacgattttatgtgtgtgttcttccctttccccttctctgtgattataactgtccctattgccttcttcctatccatcaggtgcagcatgccagcaagcaaatcacggcagataagcaatacaagggcatcatagactgcgtggttcgtatccccaaggaacagggagtcctgtccttctggcgtgggaacctggccaatgtcatcagatacttccccacccaggctctcaactttgccttcaaagataaatacaagcagatctttctgggtggtgtggacaagaggacccagttctggcgctactttgcagggaacctggcatcaggtggtgccgctggggctacatccttgtgctttgtgtaccctcttgattttgcccgtacccgtctagcagctgatgtgggcaaagctggagctgaaagggaattcaaaggccttggtgactgcctggttaagatctacaaatctgatgggattaagggcctgtaccaaggctttaatgtgtcagtacagggcattatcatctaccgagctgcctactttggtatctatgacactgcaaagggtaagtttgctatttgcttagaggctgtgggagatgtgggtacttatttgcagttataggaactcaacctagggccttgtgcatgctaatctagtgctgagctgtatccccaaaccccaggttcctattttttcctcctctttgggacagggtctcactgtgtatccctggctagcctagaacccagtatgtagaccaggctacccattcatagccatccaccttaagacagggtagcaaggtcttgcaccaatataacagaagcccaccactcattttgtttttaattgctgaaggaagccagattcttcaagtgtgaagcttgtggtagataaaatgttagttggttatagtaaataggtcagcaaaactacattttgattttttttaatctcttatttttcaggaatgctcccagatcccaagaatactcacatcttcatcagctggatgattgcacagtctgtcactgctgtcgctggcctgacttcctatccttttgacacggttcgccgtcgtatgatgatgcagtctggacgcaaaggaagtaagttcggcttgatcgtaagataaaaagtcatgggagtgaggcaagttatggccaaaaatgagtgggtggctgcctttaataactacagtctagggctagagatacagctcggtggtagagcattagcccaccgtactcaaggccctatattcaatctccagtgtcattgaaatgctgtaggctctgaaggggtgatggacagcatccatgttgtctgcacaagtgcctgtgagcaaacagccctttagatgcctatgacatggctgtccctgttctccagtcaatgcctgtgctaatgtgtaaatgcttgggtttaaaactgccattaagtgcttagaatagctcagtagtagagagcttagcatacacaaggcctaaggttccatccttagcatggggggaaaaggggggaaaatactttttaaaggtggggctcggttctgtattaggattttggaggtgttcactggcttttagtcatcaactacatgtctttattctttgcagctgatatcatgtacacaggcacgcttgactgctggcggaagatcgcgcgcgatgaagggagcaaggcttttttcaagggcgcatggtccaacgttctcagaggcatgggtggcgcctttgtgcttgtcttgtatgatgagatcaagaaatacacataattatgtcctaggtgttctccccgagaacaggcatgttgtataatataccatatcttgaacattctggacagattctctgggcttgtctgttttatcagtggcaactatttaccagttgaaaagtgggaagcaataatattcatctgaccagttttctcttaaagccatttccataatgacaataatgatgggactcaattatattttttatttcagtcactcctgataataaaaaattgaagaaataaaaatacccaaaaccagttttgttcgttgtttgtttccatataagagtctgctttgtgggggatggggtgggggaacaacacagtttctctgtataaccctggctgtcctagtagaactcaactgtagaccaggctggcctctgctgggatcgaaggtatgcactgccattgtctggctgaaagaacttttagagctagttatcagcaatcaattttgcaagaaataacttggatatgtacccctcgattcccagttcattaacaaagtagaatttgggatcagtgtacccaaaactttggtccattgcctatagcctgtcatagctgtatgagctcccagaaagtctcctgtacctgttccttattcctgtggttaaaacaagaaccacatgccaaagtttcaaatgatactttcaaatgatattaggatatcaccccatttaaatgattcttttaatataaggtaattatagttctcagttttcatccaattgccttcttcacctggctcaagccagtttttaatctcagtc

SEQ ID NO: 35696 - DNA, 1178 bp, Mus musculus
gggaggagacagggtatagactgaattgacagtttctcttcctgtcttgagccagaatgctgggttttagccaagacagttattttcaagtgtttttcgttttccaaaatcttaggaaggaaatgaaagaaagctgcctaaggcaaaagaggtgtcttttcactcacaagtttgggcttctttcctttattacacttatttatttttattttgtatgtgtttatgtgagggtgagggtgtgtctgtgtgagtgcttatgtgccatgacttgtatgttctaggagttggctctcttcttccatcctgtaggtcctgggcatcaaacaggttgtcaagtttaatcgcaagtgatcttagccactgaagcatctcacgagctggaggtttgagtttcttaccctgcccttcaccctgtcctgtgcaaagggtatgaaatgaatgtctcagaaggaaaacgccctctgttaaagattctacaggcctggtggactgattagaagttcatggttgtggagttgggatgttgcagatacagatgtcatggactatcattagcctccttcaaagccattctttgcccgattgtctatctgacttaatctccatgtgactaccatgtgaaaactttggaaatgtactgacagacaactagctttcccaagccaaaggctaaggataccatctgataccatgaggcctacagcagaggttagcctcagtttgctggaaacacctgcctgatgtttccactaatgtattgaaagattatgacttttcttttgctactataaaaccttcataacatggttatttcatttgtatttgcaataccctgaagccatgttccctcataaagtcttaattctctttgaggtaagagctgtttttgcttcgtcacaggtaatagccattcaccttgtacacacatcctggccccgtcctgcccttggcatagagaactgtttcccaacaggctctggtcaggtgatctcaggtcaacaccacctgcttgctcttgcctaaacctgctgagaggaatttgcacagtccagagaagacaagaagttagtctctagtgggcttcaggaggcaacagagtccacagagggcaagtgttacagtgggtagcctgaagttgactttatgcaggggttcttggtacaacactagactaagtc

SEQ ID NO: 35697 - DNA, 2864 bp, Mus musculus
cttttgctttctcatcacatgtattccattagtccttttcccccttcatgaccttctttctagactcatgccctacacgcatacacataggattttaaatctaggttttaggagccaggctttaagttgatgagtaaggattctaaaaccatttttggcatgtacactgagcaggaagggagcgtgaacagttagagtaaacaagaaatgttaagagtgtcatgtgattgtgatatatcagggcctacttttttttctttccaggctgaattggaagccaagaaagcaaaaatgaaggggaccctgatcgacaatcagttcaaataatcaagatctttctgggttcagactggaggcagcagttagatgaggaagagtagcttcaagatgtgttttcgtttctgtttctcccagaagggttttctgaccatcctattggttttctgacactttttcttttcttccattgaagtccttgactccatttcacttgctttctaggaggtagattgtttgtaaaatctctgtatatatgttttctgtctttcttgtctttgagatcaggtcttgttacataccagagtatggccttgaactttgtgagcctcctctcctgtcttagtctctctctctctctctctctctctctctctctctctctgctgaagttccaggaccacaccaccacacctggcttctgtagcagtcctcttttcttttgacgtatacttcttttgcaatgtagctagtactagtaagcatttgactttctctagtgtctgacatagatgtcttttcttcttcaaagttattgcagtttttaaaggttttttttgttgtttttttttttaaatatggtatgagaggaaggtgaccaaaattaagtttaaaatacagccaggtagatccttttaagaaacactgtctctgatctttgaactgttcttagaattgactatggtctatggtttgaatctttctcctatcagtagagatcagttagaaacaccaaacctgcagaaatacttccttactcaaaatcttagaattctaggtgaaccatgctatgtcagacttcagaataaaagaaggaaaagccatgtggctgggggtgtagctcagtagtggaatgcatgctaggcatgtgtgaggacagccccagcaccaaaacaaaaaacaaacaaacaggaaagccagatcacagatgcagggctaggatggctcaggtcggatttaaatatggccttgctaagtaacccaaaggagttagtcagtcagctgggagaatactctatgagtacacagaagggggcatagtgagaggagcttatctgttgttgggcatcttgttttatgtttgctctttgctgaagagcgtctgaaatgtgtcattctccttcaattatgtcagcatccatgtgattcttccatatagttctctgtttgcctgtcttgcaaggcccaaggagacactgaatgtgttgtcttcctcgtgctatctatgatggattgcactttttaaatactcaaggcttgttggtgaggtgttgccaggaaatagttttcttcgccttttttctgatttctgtttctgcgggggaaagccacttagaggagaggtacagttgagctagcaatgactggactgatgtgggttagcgatcctgggaattggaagaatggggctatgttaccaccttcccagttattctgtagacagcagggtcttcctatagctaagtcttcacctcattttctgtcctagttgtgagacagaattaaaattaacatttgtgaatggtcaaatatgtccaggcaatgacctctacctttccgccactttatccccaaattcttatgtgtacagcttggatatacacagaccaccatagaaattcaggcttctattctctggccacagcctgtagctgtttctagtctcacaagctcccatccttttagacctttttaggtgtgactttcgatttgaggggtgattattttgctaataataatgaaacataattgtcgtaacagtaacattaatactcattagtctccattgagtacttggttggagaaagcactttagaggtatgagctcacgcttagcacctcctaggagataagttaactgttgccatcactgttttacaaagcactcggaaactcggaattttcctttcccaagatccactagcctttggtaaagccagaagactgacttgaaaactcaagctctttcctatgctgaactgctgcttctatggaattttgtatcattcgattagaacataatttcattttgaaaaaaaaaaaaaaaaccactgaattgcaatgtaaaaatattaagctagagaactccctaaagcaattctgtagttatgcttgtacatattttatgaaataactcgctctaaccatttgaatatctgacacaagttacacattttactgcttctaacaataatgaaatattacgtcattagtagcaagtaagtacatacttctcattatattttactttctaccagaagttattagaacaagatgtactttctctattctttattaacttccagtgatttttttttagcaaatgtgttttaatattaataaaaagagccatattgacatttgggaaagtcataagtctgcaagtgatcagctgtgagaaaattatgaaaatgttataaaatattcttactctaatagttggtgacatttggcattgtaactatcacttaagaaaaattaaaaggctttttaaaagctaacctgttttgttgggggtgctgacatgtatgaatagttctgagtgtcataccaagcaaaactctcttcaaaatgaaataaaataaata

SEQ ID NO: 35698 - DNA, 2304 bp, Mus musculus
ttgaccttctccacggagctgaccaatgatgaacggaagcaaatccatcagattgctcagaagtatggcctgaagagtaagtctcatggggtgggccatgataggtacctggtggtaggtcgaaaacggcggaaggaagacctactagatcaactcaaacaggagggccaagtgggacattatgagcttgttatgccccaagcaaactaagattttactaagttgtcttataaatgcctcatgaggtagatacacaaataacaaaaaaagctatatgttctggttgaagagtattcattcttaagatgtttcaccttgttcatttcatatagtgctttattaggtattggaacctagagaattctgtccacttgtattcttagcttaatccagcagatgatattgtgcagttactgtttgtgtctttgatatggctctgttccctcagattttagtagtttgtacaagtaaaaacacccatctaagtgcaatttcaccctgaggcaaatacttcacattataaagggcatagcacagccatctgcaacaatatgtaaagtcaatgctgactcttaactacgctaattccagatttacttaacatgtcaggtcattttgtatcaccaattttcatctttgtgagaagccagttgtagagcatttaacaataaattgtgctgtacgtgtaaatgtctttatcaactaaatgatgtaaaattttctttaaagtaattttagtgtgtgtttgtttataacttctaccctgtgatttccaggatattggaagtgatttactgtatcttgtgacatatgacttttaaacaaattctagtcttcatgctgagagagcactactgagagagatgtcgaaaagtttccaaaaagccttgattcaatcagaagaaagaaagcttgaactgtttgttcttggtgccttgcagagagactcagagcaactctccattgtagctttcacatggtttgtgcaccacacccaaggcaaccatagctgtggtagagcttggtaaaagactgaagatacactggtgctttgatgaaaaaggtcagttggctggttcccctctcaaaaagcttattactcccaaagccaactttgtaacatacttaaaactgctattttcgcttatttctggaatgtaaaaatgtataaaaataagagttagtgtatgcttcctgaataaaaaggagccaaagttgatcaaaattagtgctgtaattatttctggagagcagcctagtagcaacactttgggtttttgaaagtgatgattgcacaaaatgtttcagttagagttagagcacacacagataaatgtaatgatttagcaaatgggagcagactctgtcactcatcacattttggggggtgttttttttccttgaatgccaatattctggcttatcaaatctttgggtgtttagttttatgtggttttattgtatcgtaaatgaatcaactaaaatccagcaatacagcaaataaatattaatatttagttaactccagagaaatgatggtaaggactcttaggctgtttgcaatatcttttaaaaaaagatttatttttttataatgtgtggatgtctgtgagggggttatatgcatgtgagtgcatatgcccatggagcccagaagtgtcagttggagcctcctgatgtgggtgctggaaactgaactctggtcctctgaaagagcagtatatgttcttaactgctgagccagctcttgagcacccatttgcagtgtccatgtttggcatacaagtggttcaccgtacatggtaaattcctttttgccctccccttttctatttaatgctaaaaggctagagtaaaagactatttaaacatatcaattagcttttacacctggatctcttaacttagatgcacctctattggctagcacagtacagcatcagccttctgcttgttttccataccatagtctacatacgaacgttagttttagtaaaagagatgtacattttactttggtgcttaatactttagcaaaagcagagaactacgatagaattttgtgattataattatttttttgtacctgccaaaattcactcccattttggaaagttgtggttcgggtacttagaacactgtgtccttggttctgagtgacaaaaggtgggttttagagactacaagatatggaaacttggtttgcattctcgatgtacgtcttcctcccagaatgttttgttgttgtttggttttggtggaaaaatggtagaaaatccaaagtcaggtttgttgataaaagtg

SEQ ID NO: 35699 - DNA, 1200 bp, Mus musculus
ctggaagtggagaattgcaggaaaccctatgcctagaggcgaaacaaaatgaagccagccacctcgggaacagaaagccctaaagcaaaatctccaagtatctcagatacactcagtaatcaggagagccaggctactgagtgaaggctgtctgggtctcctagagaaaggccccttatttgtacccatggagttctgtttgtttttaaaaaaacaagttcttactatgtagccctggctagccttgaaatcacaaaacagaccaggctggcctgaaattcacagagatttgcctgctggtattttgcactggcattaaaggcaaacaccaccacacccagctgccttaggggggttaatccaccttcccagactgcctgccagcctgaaagtaccaccttccttaaaaagtacttgtatttttaaacgaggcctttcatttgcatctgtatatacactccctacttgagcctggaggatttcagaatacttcacaagtatttgagctacacaaccctctaaaagcaagcaaaaactgtatataaagtgaggagctttttgatcagcatggctgatataccccaccccatgctataggaggatagtgacacgtagagaaacgaagggactcatccaaggtcccagcgctattccttggcaagcaaaatttccaatttcctgtctctgggttcctaatccttttcaccaagcaacccaagtatttatggttttttctggagacaagatttttttcttttttttttatgttcagagaaaccagtgttagatgactcttgagggtttttatgtagaaaaataggatagggtgggtaggcacaggtgaagagaaagctccaggccagctgccatgatgctggatgatcagttagctgtaagtctgtaagtcaaaacagaaaatcagatcctgtaagtctgaaccaggaccaggccagtgtacatttcactggtgcactgtgtaatcagggaactcaggtagatataaaaagcaatggtacctattaaaagatgatgctaaatttcattgagaagttctcactgtaaatgagacaaacttttgtctgtcttcacttgaaagtctttaattagtacaattgttactatttttttaaaaaattactctaagttccctgtttacttctggcaaaacaaaaaacactcattagagaaatggtctgtgct

SEQ ID NO: 35700 - DNA, 1541 bp, Mus musculus
ggtctcccccaggcaagggaagcgcctttctgagttctttctgtggtgtgggggatgcaggcccacatgtggtcagaggacagttggtgggaattggtttttcccaacatgctgggattaaagataagcattgcccagttttgggattagtaaaaatctgggtgtggctctgctggggcaaaaagtgagcctccttgttcttaatttagccacttaagcttgatatcaacaacccactctagccttacattcgagttaattactatcttctgtcttctggtatggtacatgtatttagagactttacttgcagtcaggactagactttcaaactttggttcccccccacccccatagagtgctaaggaaagctttgaagcactaggcagcggaccttagatgctttaccgggtagtcttttgctttttgaaacagtcttgtttagcccaggctggctaatctgctccaaccttccaagtaagtgctgaggttacaggtgtgtgccacctttataggtaactttgaaagaaaagcaggtagcaattacagtgcttcattttgtgggagtactgccattatcctgctgaaagaaaagccatgttggttgtttctgatttttgcttttggggtaaaaatcgtgacaccttgacatgaacagttcagagactggttagcttagctctgctacttactgtaagtccttttatgctctagcaagcgctttaaataaattctcttgttcctctgaaagtctgactctgctagaggagcaggtttgttgtgaccaacccaccttgtaactggtggcttctctttgtacaggtacaactctaagagaagacactggaggagaacgaagctgggtctgtaaggattcacacaatggcaagactgaggatttatactgaattgtcatcaatcagtcctaccagatggatttcaacatttaaacctggagactcttcgtgtcttgaattaggatgtttgtccagtaataaaatatagaacctttcaaaatgcttttctggtttataaagtactgaattgcccttataagacccgataaggcttcttctgtggggtaaaatattgtttcctaggagctagagattactcagcagataagggtacttggtattcttgcagaagtcctggtttttggatcctaatactcatagtttttgttttaaaccttaagattgagtccacatgtttaagccacagtgttagtgtagaggtcaggacaactggagtcctctgtttttacatgtgttccaggtgtttatggcaagggctttaccaacagctatctcagtgaaagcaatcccccacttttgcatagtggctttttgtttttgtttttttttttccaagacggggtttctctgtaaccctggctgtcctggaactcactctgtagaccatgctggcttcaaactctgcctgcctctgcctcccaagtgctgggattaaaggtgtgcaccaccaccgcccaacaaagtggcttgttctaatcccttgtgttatagattgagctcagg

SEQ ID NO: 35701 - DNA, 1541 bp, Mus musculus; identical to SEQ ID NO: 35700

SEQ ID NO: 35702 - DNA, 1441 bp, Mus musculus
tgccatgcactaggcacttgtttcaatccctcctgccaaaaaaaaaaaaaaaagtttggtttttttgttttttttttgttttttgtttttttttggaggagaaaggaaaggggaagttattatgtaacatatatccaggtctttggtctggatatatgagtgcataatttagggctgcggaatctggcccccatgttaaagcagaataacagtgttataacataaatggctttttttcctttcaggatcgtccagccatgcagctttaccaaccaggagctcgaagccgaagccgactctgtcccgccgatgacagcatcaagcctggagattccccagtggacaaaaagcaggaaagtggtattagccatagaaaagaaggaggagaggagtgagaagtccaaatggtcataggtgtcctgactgtccaggcagccaaagagcacgtattatgctatccagaagtgccttcagggcaaaggaacagagaacaagaaaaggggtcgctgtgctggtgggatgtactacagaggagtgtgtctaagcagaataagattgcaggctcagaaccgaaggacaatttcattgttttctgcagtttccacaagttaattttaatgtctcagaaaaagatggtagcaagaacattgcaagtgaaaaatgtcaaataagggcttaactttgtatgacagctaaaaagagcaggttcgaaaatcaatgggtgctcttaatcctggcttggagcatcttcgtttgagtggagcagaaacacactaagtttcgttgggatctaactattttgcattgttggtgttgactgttgactctgtagtgtaggagcaatgagcatgtaattgtagcacaagtagagcggaggatagagcaaattatggctgatggaaaagatttaaatagtcacgttacatctatatcctgtgtctgaagttttcataattacagcttgttttaattctgtaaatgtagcatcaaaaattccttgtaaacatctcgtttttgcctttagcgttttttcctattactaggtaaaatgtagcccttggctagttactgacaatctagtctttgttttatcttaggtctgatgatttgagtgcataccctcttccaggaaggaagctacaccattatctgttcctgttatggcagctttcagtcttagcttgtttttgtaatgctgtcaataaatttccacttcgttccggtttgaagctgcgtttatttattcaagtactgactcatatgtggtactgggggtggaaccaagggcctcaagcatgtgatgtgtgtattctactactgagctataacctctccagccccatgccaagtgaggctgttagttttaataaattaaacatttcattctgacttaagttcttgggaattttgaaaggggataaatgatattaatttctgcctt

SEQ ID NO: 35703 - DNA, 2420 bp, Mus musculus
tacttaccattgttctttcagtggctaggatgtagctcagagttagagcacgtgcttatgaggccccgagctacatccccagcagtgcaaaaaagttccaaatgcagttttgggagtctattgtgccaatataagaatactatttctatttaagctggtatttaatagaggataatatcttaaaaatgagtattaagagtgctaataagggaaaatataataagtcagtattttaattaagctgtttcatgatgatgatgaaagtaaaatattaaacattttcaattatgtcctttatattaccagatttcttgtttgagacagagtctcactatgtagccctggatggcctagaactcccagagttccccctgcctcagcctgccaggtgctaggattagaggtgtgtgccactgcacctcactataggattttattttaaatattgttaagctcttcagctttttatatctgtcatgactttaatccttaactttctagaaaccctccttacttcattactgtttgaaagtttaatatatgttctgagaaaatgtgtttctaacccacaactgctgaactaagcagcagttagcatgtagtaaaatctgtgatctttgaacttgaaattatttcatggtatttatacgtctcagtctgataagtatatagtttcctaaagtctaatggaaactaggttccaaagttgaaagtcttcttaatccatacacttcctcatgtaatacaatgtaaagtttataatcgctactttaaaagttaaaacgaagggccattattttttgttaaatggctcctagcaactgggtgaatatgtttttcttttttttaataggaaatgtagtttcaatgcaacaattttgtagtgtataagtattacagattttcttttgattattctccacagagtatatacagtcaatgaaaaaataggaatttatttaaaaatctatcattatttagtagcagtcctttaaaaaatggagggctaaaagtattttatttttagcttgtttgaattatcccttcaaactgtgttctttcacctgagctctaagtcagccattgtttgcaaaaacatatctttccttgtctacagaagaagaaacacacactcgtgtacacacacacacacacacacacacacacacacacacttataattgaacaaaacattaagccaggaatttcctctttgttacattcctagtgaacaaggtagtggttatgcttctatctgttttctttatagctctttaggcctgagtaaaggctatgtagaagtattgtaatttaaatattttgttttctaaagagacttactcagtttctcacctcttcgcctgttgtttataggatttctctctttttttatttgttgtacaaagataataggaaaaatagagaaattgctcagtcctaccacatgaattgttacaagtgttctgtgtcccttgtacgtctttgtcatttgaagtgtactgtaaagttgtctttggtattttaaaattgtgtgagcaggcataggagtcccattgggaagttaggaatacatgatgatccagtgtgaagacagaaataaggaagggtggtaacccacccctgcttcattgcaatcatgagcatgatgggatgttcagagtttagcagtgaggtcatctgacagtagaagagatctatgggtagtggagcccttcagactgttagtgtgagatatagaacggttgccagtttgttatccagatacccataaaaatgtctatcaagcctagagctaggcagagagaaggaccagacagctaagggccagtggctgaactttagtaatgttcacaactcgactctgtgcttgccacactccaaaatcttctccagaacagaaaacaacttattgcagaatggataatgaataaaaacaaaaacacagttgggttgtgtgccatgagtttattactcaataaatattatgtgctttgacatgtttcatatttttaatgtgtggattgtaaacatcctcaaacataacataggaatcaaacaactttaaagggaatggactccaacaaaatatgcttggtctcagtaatgtcccgcagccactgttctcgaaatcgaatttctcctggtctgtagaggaagggaaaaaacaacacacatcacacacgaagcttttttttttttttttggtttttcgagacagggtttctctgtgtagccctggctgtcctggaactcactttgtaaaccaggctggcatccaactcagaaatctgcccacctctgcctcccaagtgctgggattaaaggtgtgcaccaccacgccgagtcacacacatcaaaaggttgaggcaggacttccctccttacattcccagtgagcaagattctggctgggttctagc

SEQ ID NO: 35704 - DNA, 1186 bp, Mus musculus
ctatgtcagtcgtgatgcccaatatacagcctgtggcagtactggtgcttggagtacagcttatgccatatatggtgccccatgtatggactatgtcaataatggtgactggtatacagcccgtgcccactcctatgccacatgtgcagcctatggcagtcattgtgctttgggcacagcccatgcccactcctgtgccacatgtgcagcctatggcagttattgtgctttgggcacacaccatgcccattcctgtgccacatgcacagtgtatgccaatcagtagaccctgggcacagcccatgcctgctcctgtgccgcatgtgcagcctatggcagtcattgtgctttgggcacaatctatgcccatttctgtgccatgtgcacagcgtatgccaatcagtaggccctgggcacagcccatgcgcactcctgtgccacatgtgcagcctatggcagttattgtgctttgggcacagtctatgcccattcctgtgccacatgcacagtgtatgccaatcagtaggccctgggcacagcccatgcccactcctgtgctacatgtgcagcctatggcagttattgtgctttgggcacaacccatgcccattcctgtgccacatgcacagcgtatgccaatcagtagaccctgggcacagcccatgcccactcctgtgctacatgtgcagcctatggcagtcattgtgctttgggcacagtccatgcccactcctgtgccacatgtggagcctatggcagtcattgtgctttgggcacagtctatgcccattcctgtgccacatgcacagcatatgccaatcagtaggccctgggcacagcccatgcccactcctgtgccacatgtgcagtctatggcagtcattgtgcttcgggcacagcccattcctgttcccaatttacagcctgttctaatcagtaggccctgggcacagcctatgcccattcctgtgccccatgtacagcatatgccagtcactgtcccatgggcacaacctgtaccagctaagatacctagcataccacatatgccaatgcctaccgcacagcctatgccagtcagggtggcttgtgtacagcccatacctcttacagtgccccgggtgcggtctatgccatattcagtgagcaatatgcagcctttgccagttacaatgccccatgtaca

SEQ ID NO: 35705 - DNA, 1196 bp, Mus musculus
gagaagctggttctgatgaaacttggagctgggcagagtgacggactgcctgcgagggaagcccctgctagcaggggtgcccactgccttcctgtccagcaggcagcccccagcgctgggagtgctgtagttgagtatcttgttacccttgcataaaacttcgctcaagtcgaaaatggtggcagacacgagggtggtggtgaagaataaaaatttttactgaactcttattcaccccagagcctagacccctcccatctagaggttgttctcggaacactcctaaacttttcaccccagaacgtatccctaaactcctcaccctaccctccctaccctcccaactgaaaactgttccaagaacatttttaagataaaaaaccttcaaaatgacaaaatgaaccgagtacattgccagatgaaggacatgatgaccccttagttatgtagaatcctttggcagaaccccttgtcccttggcagaactccctagtgatgtaaacttgtgcttccctgcccaactctccccccttgagttttcctatataagcctgtgaacagctctggctaagggtcgattctcctctacaccactaggtgccactgggtgtatgagtttcgaccccagagctctggttgtctttgtgctttcatgtcgctgctgctttattaaatcttaccttctacattttatatatggtctcagtgtcttcttgggtccgcggctgtcccgggacttaagtgcctgagtggggatctcccctcgggggtctttcagtggtcatcgtgggcgttcgcaccgggcaaggactaggatctggtatgtcgtgaaggtcccagtgcggggaaggcgcagcctcctgctctccggtcaggagtcccacacgcctgttcccggcgctcctcgcctttctgactctcgccctagtagaagctcttaaagagaaaacaaataaatctcttaaagaaatataggaaaacacaaccaaacaggagaaggaattaaatagtggtccaagaccttaaagtggaagtagaaacaataaagaaaacacaaatagaggcaaccctggaaatggaaaacttaggaaagaggtcaggagctacagatgcaagcatcaacaacagaatacaagaaatagaagaaaaaaaactcaagtgtagaagataccttaaaagataattgacacaacagt

SEQ ID NO: 35706 - DNA, 1151 bp, Mus musculus
tctgggtttggtggctgattatgggatggatcgccaggtggggtagtctctggatggtccatccttttgtcttagctccaaactttgcctctgtaactccttccatgggtgttttgttcactattctaaggaggaatgaagtatctacactttggtcttcgttcttcttgattttcttgtgttttgcaaattgtatcttggatattctaagtttctgggctaatatccacttatcagtgagtgcatatctaatgacttcttttgtgattgggttacttcagtaaggatgatatcctccagatacatccatttgcccaataatttcataaattcattgttttaatagctgagtagtactccattgtgtaaatgcaaatgcaaatcaaaacaaccttgagattccaccttactccagtcagaatggttcagatcaaaaattcaggtgaccgtggtttactgtgagccagtgatgtcattctatcgtgcgctcttgtcaagccatttatgtgactttaataagcttagtaactttgctgactgcaccggggcctatcagtgacttatatattgcatgatgtcttcaacttgagtttgacatgtagaatcactttgatttcatggcaattgacagtcctaatggctcagctaatttgaaactaacaactttgctgtgtaaaaggaaaaatagtgttgtgttcagtaaatgtttgaaaaaaaaattcaggtgacagcagatgctggtgaggatgtggagaaagaggaacactcctccattgctggtgtgattgcaagcttgtacaaccactctggaaatcactctggcggttcctcagaaaattggacatagtactaccagaagatccagcaatacctctcctgggcatatacccagaagaagttccaactggtaataaggacacatgctccactatgttcatagcagccttatttataaaagccagaagctggaaagaacccagatgtccctcaacagaggaatggatacattcattcatttttgagacagtgtctctctttgtagcgttaacttcctggaacttgcaccagatttagaccagattggccttgaatatcataaagatcagactgcctctgccttccaagtgctgagattaaaggcctgtgtcatc

SEQ ID NO: 35707 - DNA, 1168 bp, Mus musculus
aaagacagatagcaaggtataaacatacaatgaaatactatttagttttataaggaaggaaatactagggttggggagaccagtcaagtgcttgctgtgtaaacatgaagatttgagtttgataccaagaaatgtggaaggcttggtggtatgtgcttagaatcctagcactggagaagtagagacaggcatattcctggagctcaatgcccagccatcttagcccaatttgtgagccatgggttccagtaagagaccctgcattaaaaattaaggcaggtctatggagatggtttagtggataaatagcttgtatatcaccaagtatgaggtcttcaatttggatctccagtacctacatatggttggtgggcatggtggcctacatgtaattccagtgcttggaagatagaaatggaagcaagccaattagctaaaacagacaataccattgagctctgggttcaactgagtcaccttgcctaaatgaatgaggcaaatagtaactaggaaagacttctgacatctgtacatatgtgcaagcacacatacacacacacacacacacacacacacacacacagagcttaccacatacatacaacatatatacacacatacatatataagttcacattcaaaaagtacaattgaggaagatacccagtgtcaacctctagtctcatgggcatacacacatgtacctgtacacataagaacatatatgtacacatggatacacacagaaatactgacatatgctctaacatgggtaaattctaacgatatgaagataaatgaaataagctagtcacaaaaagtaaatggtatatgattccacttacctaggatatccaagtagtcaaatgcacaaagactgaaaataggatggttgataccagaggctgggaggaggggaagttgtgaatacatataggatttcaaattagcaagatttaaatgaaagaaaaaccatcatcaacttgagaaaggctgaaggaggtcactggaggaagatgacatgggaggggctggaggaaggaaagtgaaggggtaaattatataattattgtttaattaaaaacatattttaaaagctccagagctctatttcacaatattaaacacagtatatgccactgaaacatgtatttaaaatggttaaggt

SEQ ID NO: 35708 - DNA, 1146 bp, Mus musculus
ttagaaaggggtctcggggctggagagatggctcagtcattgaaggctaggctcacaaccaaaaataaaaagaggtctgggatgtaacccagtgatactgcatgcatatatgaagttctgggttccagcctcacaacttaaaagtagcatctaaaacagactacactcaacagaaaaatctgcctatttctccattactttcagagctactatattttaagaaggaattgtttgcttatttttttggctttggcagtttggggtgtattgattatattaaacctgatatttctactgcaagatgaagcaatactgttcgtgttttttttaaggtgttgatttagaatggcctattttttaagggtataatttagaattgtttcccagctttaacttgttcagaaagttaatttatcctgcactaacaaaaagaaaaacccttctgtacacttttgtgcctcagtgagttcaagaattgatatttctaatgcattgacttttcttctcctggtaccaagtgctaactgtggaatctagtggacgctgacatgtcgtctgtcaggtggctgcctaaccaaagctcacctgggatgatcttacaaatgtattgattttgatagagtcttgtatccctgtcggggccatgagtgcctgtggcttctggagtaaggtcctagacactacgtctccttgtgtttgttggattctttagccactgagttactttgggtgtttaatgctgtgcatgtttatgccccacatgccagctttgcacacctgatactagcacgaggcagatgttgaattttctcgagctattttctctctactgagaactgaagagtccaaagatctgttttcacttcagagattttagttaagcctaaaatagtaatcttaagtccaagtcagtggttttcaacctctggattttgaccccattaacaaacccctgtctccaaaaatatttacattacaatctgtaacagtagcaaaattagttatgaagtggcaacaaaaatgttttgggatggggggggggtcaacagaaagggttgcagcattaggaaggttgaggaccactgggctaagtgatgttagtttgatagcagatcccatgatcaaatcccaatctacctctgagca

SEQ ID NO: 35709 - DNA, 1204 bp, Mus musculus
gttcatttccatcatctgtttggttgtgttttcctgtgtttctttaaggacttgtaactctttagcagtgttctcctgtatttctttgagttattaaagcccttcttgatgtcctctaccagcatcatgagatatgattttaaatctgagtcttgcttttcgggtgtgttggggtatccaggactggctgagttggaagtgctgggttctgaagatggtgagtggtcttggtttctgttagtaagatttttacgtttgcctttcgccatctggtaatctctggagtcagttgttatagttgtctctggttggatcttattcctcctgtgattctgttagcctctgtcagcagacctgggagtacagctctctcctgagtctcagtggtcagaatactctctgcagacaagctctcctcttgcagggaaggtgcacagatatgtggcattcagacccgcctcttggctgaagatgaaggcccgaaacagggccagtcccagaagatgtgttgcctctgcagtctgcatgctcacctgcacagactggtccccaagggacaggggacaaaagatggctctctcaccttctcaggtggtcagagccctccgggcagacacttctcctctggcggggaaggtaccccggatgtctggagcccgaaaatgggtctgtcccagaagctgtgttgcttctgtagtccatactctcacctgtgcagactagtctctgagggacccgggacccaagatggctccctcccctgctccgaaagagccctcccaggtggacacctctcctttggtggggaaagtgcctggatgtgtggagcccaaaaaggggtctgtcccagaagctgtgttgcttctgcagtctgctcactcaccctttgcagtctgcgagctgacctgagcagattggtctctgagggacccggtacccaagatggctccctctgacaggactttttgtttgtttgtttgtttgtttgtttaacagtgtttttattggaactcactctgatatggaactcaaaagattctcgtgcctctgcttcctgagtgctttctgttgctcctgtggtctgacacctgttcacaagggtgggtgtttctcagtgataggacactttcttagcatgtgtcaggccctgagttcaatttgcagtgatggaggtgagggtgcaggggtgggggtggagaatctc

SEQ ID NO: 35710 - DNA, 2616 bp, Mus musculus
tgcctttgttgaaatttcttttataagagcatttctgacttttaaatcagcatcttttacttttggatatttctttttgattatactcattatttgttacacactttttctcacctacagcccaggagtgttcgctggatgatgacaccattctaataccaattatagttggtgctggtctttcaggcttgattatcgttatagtgattgcttacctaattggcagaagaaagacctatgctggatatcagactctgtaacactaatccacatgtgatctgttacaaaacaataaagcaagtacaagttctcgcatgcaatactattgaaggtacattagttacagtcctgctcttagattgggtggtatagtagagctcaaattaaaacaaaagaattccaaatactatcaactacaaatgaatcatatgattttggttttcctgactaaggagtttaaaattactatggcaaaaggcatgtacaaaattatctggttctgtttcactggtctggaatttctgaatgagaacgtccagtgtaggaaaaagccggtttcttctgcctgcatgaaattgagtttggccatcctgatttccagtggatttgtacttgctccttttgcattgcttgtgacttttgtttgcaggttgacttagctacttcggccttgttccatatttgacctatgaaaaaggtatcagtagatttgaacagagcccagaggtaccatgctcttgccagtaaaattcttttcccatgtttttgaatacatttgtatttaatgtggctgaaatgacaaaaacaaaggtcctaaattttagaatagatgttatctttttatttaatctttaaaaaaaaaaactggatgtttcaatcttttaaattgcaagacacaaggcaattccaactgggcatttcaatctggttttaggtgctttagagataattgctaggcagtgccaaatgaaggcattagtgctttgtacccagaaattggcctctacatgcagcactaagattaatgcagatttctcttgaaccttccagtcttccttgttggtggtaatgtgctttgttctttcctttttttcctcaagaagaaatgttagtatgtcttagaacctaggtaacgaagtgcacttatgctcataaaattgcttgcacctaatccaaaagtcatggtcttgccttagtccattaacatggtcttcatttccagtttgcattgactgctacagcacttactaatttggcttttatgtttaaatggttctgtgataatcaaaacttaaatagttactgttcgttcattgtggtacttttgtattcagttctgtactcagagatggcaccaattgttcatttactatgcaccacctactgcttatataagagaactaataactctttcagcccgatacttaacacatcatgtattccttgcagcttctaggacatcttccatacatgtatggatgtgtacatacatatacatgtgtacatactggtatggcccagcacatatttcttaagctctgcagccatatatagaaggtccttgttatttggggaggacagattaaatgcctttcattcacaagaaaatgaagagctctctgggttccaaaatgctgatgttgaatacatgatatatatgcacacatataggcacttgcatgttagcatgttcatgtctgtgactgtcttttgagttatataggagtggcagagattgtgtcactttaacttgttgtcgacttagcctgaaaaccttactagttcagaatcatactcctgactgtcttctggagcaacagggaactgcatggccaacttaaagtacttgttataaatgaaccagaaatctgattttaaaatacatttttcattttaattgtttttgcattttgttttgttaatccttaaaggatggattgtgcttttaagaatgtaagtgttatgtatttgtcatgaatcaacaaaacagcttttaaaaaagactaattggaacaagtgggtggcactggcttaatgctgttaatgtttctaaacgattttacatttagattatatatcggattcatattgagatacctccaaagcactgttttatagaaagatctgacttcaataaatatttttgtattttacatgggccagtttatgtaccgctatttacactattatttcctatagacaatacacactgtctttgtagtttttgtatttttgttttgttttactggttttgcttcttgatggtaatatactctgtctggtgtgggatattttccacactttagaatttgtataagaaactggtccatgtaagtactttccatgttttctcttcaaatgtttaaagtgctagctgatgtacgtacgatatctcttctcagatatttgcctgtctgtttgcccaaaattgcttctaaatcaataaagattcttttatttcttaaggaaatttgctcacattttttcccactgcttaaaagtgaagattttgtatattacatgatggcaattaaaaaaaaacttagaagtgcttaagaatagaaagagctagattgtttccagtatatgttgtctgtatgctactcagtcgaaaga

SEQ ID NO: 35711 - DNA, 1218 bp, Mus musculus
tattagtattttgcatgaatgtatgtttgtacttcatgtgggtgcctagtacccgtagaagccaaaagaggacatgagattccccccagaactagaattttagacagttgtgagctgccatgtggttactgggaatcaaacctccatcctctgcaagaacaagtgctcttacccagtcagccatctctgcagccccgtccctcagtttcttggatgctggggttgtaagtgtgcaccattatgcctggcttctcaattactttcataatagttttgagtggtttgggtagaagaagaggatcctttatttttaaattgattttaagtaacacataaaacaaaattgtacacagtaaaatgagatgtcatgatttttggatgcatgtgaataattctaattttaaagaatcaaactaaacattgctccctggtgttgctcatttctttatgggaaagttttggaaaaatcctttccttttgaagtgtgcagtatactgctgctgtgccgtgcagtgtgttggtgttgaagcgtatcagggttgcttactcctaagtgtcctaactgttatttagtttctcttgattggcatgtcttcatcccttctcatgtactctgcccagcttcttgtagccacgattttacactcaacttctaaagactacagcaaaagagagatgcacactcatacctgtaatggatatagatgcaaaactcttagaaccatagcaaattgaatgccacaacatattaaaaagatcatttatcatggctgaggaggcttgacaccaggggtataatctggggaactttatgccaagctttgagatcaagcacaggcaaaacaaaactccagctggttaggaattggaagttggagttctcagcagcactctacaggtagacttggatctgcttggcagctccatttcatgtctaagaagaaaagaatggtggcaaaaacctatgttccttatccaaggtctttctgaaatgaatctttgccaatacttagtcattatcagccgccacaagctttagcatagtgtttgggcttgctaaggcagctagggctctggagcatgaaaggtagccttttgtgtatggcttgaaagcggttgctgaggcatgctggcttggtattcctcttaggagttttctctttagtttgatagcatgtctctacctgtaaatgacactggcttgcttggatagcatta

SEQ ID NO: 35712 - DNA, 2442 bp, Mus musculus
taaactaatttgttgaatctcatgttatttgacttcttttatacttctgatgaccaaatgaagcagtgtaatgggaatagttgtgtggacttttctcagtggttaacatacccattttaaagagtaatacttaacttttaagaagaatgttgttgaattctatgcatgttatttagtatgatgtgcagaaaactctttaagaaagtacctgggtcttcatgattccttttggaactggggaagagatccctatggccattaaaaggggggagggtgattcttatacatcattaataaagcaaaaggtttatttgcctaaaagtcatttaaagatacttaaactgcatgcaaattttatttactgtacagagttctggatgtatttatcaaatagaaaaaccacccttgacttggttgtttacccattttgtggtttcccttgaaaagaaaagtaagttttcattgttgttggcattctgttacactgaaggggaaataatcttatttggaaacaagtttttcaagtagggtgacagttccttccatcgtaccttatatattcgcatcctaaaggtttcccattaggactctgggatgtgtacataagacttagccccacattcactgtgctgattaacaggaacttattaaaatagaaaatttgctgatcgtcttgtactacaagaacatagcaagaggggaaaacccaggtccttttattaaaactgaatacagtatgaaaatcacaggagaccaaaatcaacaaataagttttataagttgcaggagtaaaaatgtaccagctgcttttcattatgtttcagtggttaaatgtttgggtcgtgctgccgtctttaagttgggtggatcgtcaattgtcagaggtttcctaggatttgcattccagttttttctactaaatgatttttttttttactgtcatgcgcctcctgatttggagaaactcaacatatgattctcccttgtcttccttgcacactccctattgaaaacttcaagttctgtagtccttttttttttaattgcttgaatttaagagttctttatagacattggacacttgctgttcaggaagtgtctccaaattggtctcacacagaaagtaaggaaagtattgtttttcaatttcaaactgtgagtaaaagacttttcttcctcaccagaggactctgctttgcttcctggtttctctttccatggaggaaatggatgatggcaaagaagcagactgtttttgtgttttcttttacattagaacttcttcagtgctttctccactagcacatatctttgtctttatggagcaattaggcatactttcagctccgaagacttgggggctcttatgtctgctattgttttcttgaattctcaaagacctgtggctagctatctgtattttttaagttgcctgtttctctctaatgcatcaacttgcacactgtttgactatgtacagtatttagagttaacttcccggttctttctgagcagctatttcgtatattttttccagctcctccctgatttccttacaggagctcttctgacaaggaatgtggctgttatgtttactggatcatcaacatcagtgttgtaattcatccctgtgttggtctctgggatatggagactattacaccactcactagttactcttaaaagaatttgtaggtaggtttgttcctactaggacgctcttgataccaccttcattatcttgaaagtgggtgcctgtcctgaagttcttaattctttaaaaacttgacggtgtttcagctgaaaagctagccagactactaagggaaactgtttatgaaactgacaagtaatggcaaactccattggattattatgagtttcagttgttctgtatcggttgaatttttgtgctcttccctgtgtatgtgtggtggttctatttttctccaataaaacttttattttaaaaaaatgtttctggggaagatatttaaactcgaaatattgtgaaaaaattgtaaattagaatgaatacataaaatcttcctaatgacttccttaattcacatttgacaattcatacttgattatttttatacttctctttgttattttactggtagttttgagatactgtggaggaggttatggtaaaaagacagtaaattttccagtattctcaaagtagacaattatttccactttagaaaaatcaagggcacgtgtaaatatgtttccttcaaactttcaaagtcagcaatttcctgccagtatagaagtactttagagtgaagttggaagaaaaagaagacatgcttcttgtggtgcttgttgttctgttctgaaccaaaaatccagtcacacatgttcaatggtttctaattcagttcctgagtctgctgaatggtgactctgccgtaaccttgacatctttgctac

SEQ ID NO: 35713 - DNA, 1118 bp, Mus musculus
agctccttgggtactttctctagctcctccattgggggccctgtgttctatcctatagatgaatgtatccacttctgtgtttgccagacactggcatagcctcattgtgtcagcaaaatcttgctggcatatgcaatagtgtctgcgtttggaggctgattatgggatggatccccgggtatggcagtctctagatggtccatccttttgtttcagctccaaactttgtctctgtaactccttccatgggtgttttgttcccaattctaagaaggggctaagtgtccacactttggtctccgttcttgagttgcatgtgttttgctcttttcattcttacaagtggttacagatcatatttgatgcccacgttaagttttgcgttttagtttctgatgtaaagtttttgttgtattaccttgaaatataaacatgtaaacatctttaacagaatgtggagccgcttttaccagcaagcttgaaggaatgttcaaagacatggagctttctaaagatatcatgattcagtttaaacaggtaaaggctggttaaactctcttacctaatcccttaaacttcaggatacttcagttatgtccttgcggcagtttgtattgaagaagaagataaatagaagcccatatatatatatataaacaaataattcatggcaattcaaacagtacagtataggaaagagatcatcaatgaattttaagtatatttagcttacttcaggatttagtcataattaacatccagaataagacagaaacataagtaaaaatgtattacactaaagttagtattagaagaattatacttagatagtaagagcggggcttttctaatcagttggaggctttacatgttcaaagcttgtaatggggatagaggtgaggtgatcaaggacaggggtggtatattctgtctctcttgacatttgggatgagaatttggatctatagttttgaagacctaaataggaggttgttttaaagtattgtaaaaatataagcaaccagatgtaatttgtgtaactagtctcagctgcttggaatgctgaaatagtatgtgggcaatataagtgagaccttgtctcaaacagtagtggcagt

SEQ ID NO: 35714 - DNA, 1099 bp, Mus musculus
gagctgctgctcactaacgttttgctcttttatttttcttgttactttacagtaaaagtcttgtttgttttatgaaagtaagatagcataatgtcttggtccttcagcaggtgcttagcatactttattaatggggaggggaattgagagagtagtagaggcagagagagagaggagagaagtagaggccacacatggagagaggggggaatggggaggaggggaagaggtgaggggacagagtgggagcaagaaggtaagagcaagagcctgattttagagttttgaagccatttatgaatgaccaaataagctgctcaatgccagtatagtggaaagtattttgtctttgaactaattttatttctaatttcactaagaggaaataagacactaaaacctagttatggaagaagccaggaattcagcttcagttctcatttaagacaaaatgggtttcctatatgctttaataatgttattcaaaattaaatgtggatttttttttataattactacttcaaagtctgaggacccagactttgataagtcagcctgtgcacatgtggtattgccaattcagatgatacttttttgtttttaattttagggacatgggattagagttatttagggctcatattataagtgatcaaaaagtacagacaaaaacgattgatggcatccttctcttgattgagagagagcggaatggtgaagcaattgatagaagtttacttcgaagccttttaagtatgctgtctgatttgcaagtaagttgtacttaacactcactgtgctacctacaaatctgattactgttcatagtttgtctgcaatccatggagtgttgttcaaatggagttctgatggaagtcattcagtaaatacttaatgattaagcaaatacttttgttttcccttttttctagatttaccaagattcttttgaacagcaatttttgcaagaaactaatcggctttacgcagccgaaggtcagaagttaatgcaagaaagagaggtattttaaaatgtttaatgactccagtgtctcttacaatagccatttccttgtagaacacaaacttccctttgtat

SEQ ID NO: 35715 - DNA, 1136 bp, Mus musculus
ccattgactagttatggtgaccttgggcgagcttagcaaatgagttccaggctcactttcttcagctgtaaagttggggttgctaagattccctgcgaatgtgttattgttgagacaatttctataaagtttctgaaatacttttcatatagtgtgtactcagtattttaaatcttccctacaagattcatgtcagcttctgttttacacgtgataaaacaagatcagaactgctatttttatctgtcattctcaaatttttatatttgaagcagtaacaatcaataggagaaaaaaataccttcaattttcataggtgaatcaaaataacagtattttggcatcttaaattttgtttatattgaacttttaaatatcacagttaccttaatgttgaggtattaaaaggatcctaaaatagcagtactgttctattttatagttctttggttactatatccttaatatttttctaattttgtttgcatattatttagataagcctaaattaccagaaaactatacggatgagacatggcaaaagctaaaagaagcagtggaagccattcagaatagtacttcaattaagtacaatttagaagaactctaccaggtatgtattagtatgtaaaaccacactttaccaacataagctaagatggaatgcatttgtattttcctttttttaaagatttattttgtatgtgcatgtgctagagtgtgtgtgtgtgtgtgtgtgtttgtgtgtgtgtgtgcatgcgcacacaaaacatgtgtgcccttggagaccagggcttaggttccttctaagctggagctataggcagttgtgagctgtctgacatgggtgctgggaatcagatttggaaagagttctcttaactgtcccctgtattttaacgtcctgaagtacattctttagtagagttttgatcacttactagttaaatggtgccttctttttttatgatcataacacacagtattacttcagctggggatccataattggacagttctgataaggctttattaatattttggtatagtagaggtatgacccagactgggctgttatagcatagattagctattctttttctgtgggttgtcatttctgttgcggtagctcttgt

SEQ ID NO: 35716 - DNA, 1123 bp, Mus musculus
ttgaccttgaattcctgatctgtctccagtgttgggattatagatgtgtgctgcacaccagctttagaatcactgtaacatgaatttcagaggtggttatgtggcttagtagtgaagggcttgtgtagcatgtgtgaggccctgggtttgactctgtagcaccagaagaaacaaatagccactaaaaggtatcagatcaagcaaacttacaaatcccacaaactgccacagagtctgtagtttaggcaataacataatgacagtaaatttcctacatgttactcaatgattatgaagtatcaagatactttcaattgtgtttatcatgaatgcataaaaattcataaagcatgtttctgtgtttttttttccttctgcagtgagaaagtaaacaaaggaattggcattgaaaatatccattatctaaatgatggtctgtggcatatgaagacatataaatgagcctcaaaaggaatgtgcatgggctaactatggatactgtgctgtatctgtgtctgtgtctgtgtgacagcatgaagacaaagcctctatgattatgctgaataaaaattccgcggatgcttaatttctgttagtttcagaaattattttaacttttcttaaacaaaaattataatgtggtagcaaacttggctattaaaaggtatatggtaaataactcaacagatgactcaatgtcctatttgggctaatggtataagagggcttggtaaacatgttggccatatttatggtggactcctagatagtttgtctagttatggagccagaagctagatttagaattttattccattattcagagcacccataagtgttccctctgtgtgtgtgtgaatgtgtgtttgttgttttaaagttcactttggaatgttccaaagggagtgtaaaatctgggtgtagtataatagactgtccttccttcatcgtctgtttctctctatgagcactcctttttacccctgcctcagctttcctcctattccccagttactgtgaagcaaaggttagcctactcttttacctttaactacttgtatatgtatctttaagaagaaaaatagcctttaaaaaatagagctataataccctgaaaatgctt

SEQ ID NO: 35717 - DNA, 2625 bp, Mus musculus
gcatctaacacattgcaatcctcctgtctcatgctctcaaagttctagggttataagtatgtttggtacattgagctttggaatggatttccagttgtaaccccaaacctcagtattattgaataagactgtgtggacactattgagatggtgtggataacactgagtatctttccacttgctcttgtacttgttgatttgtcattccagggtgtggacagacccctaagctgaacgtttcccgaggaggatgccaaagctccatgagtcactctcagaatgacatctcccatatttaagagcttctggtgctgtccattttatgggaatctgctttaagtcagaagatgcatacataccaccatccttttgacaagacattccaaagtcactgattttcagaacattattttcacctgcaggcagtttcttggaacaaggtccccgtgcatacaattttatgtgggacacaccatccagaagcagcatctaaaggaaaattcactaactgacttttagttcatctttctttctcagaaaggagaggaaattgcctcctggaagcaattccttaatgatgtagataggttgcctttgtgtgtgaattctgtaagtgtgaaaacattggggtgattatgttgcttggagggttttggcttcttataaaattttaattccaattcatgggaaagatctttgtgttttaacagcaaaaacatttttattatttaatatgtacccttaaatatgtcatcaaaagttttcttgtccttaaggaattctcatagtatgacatgatcataattgagaccccatttcttattctggttattgtcatatagataccatgatgttctttttctttcccatttcttattttcatcagcatggtcatgtgaataccatgaagttctttattgaaacatcattcattttcagtctaaaatcctgagatatagtcaacattttaaagtggataattcagtggtctttagtacattgactgtgtggtgcagtctaatctcagaacgtgcaggttagcagtcattcttatttctcttctttcttcagccactggaagctactgacacattttctgcctatgaatttgcctgttttgggacatttcatataaatggaattgtgcaatatcatgtcctgggggccagggttctttcaactaccatcttgttatcaagagtcatccatggtatagcatgtgtcaataatccattccttcttaaaggttaaatattccatagaatgaatgtgtaccatattttgtttacccatttattcattgagggacagaaacaattacactttttaagtaataaaattagaaggtcaacatcagtgtatccaaaattataattgatgatgtcaagattatacatggtatgcacagaatgctgtgtagaaatgatgtgtaaattatttgtcagcatttcatgcaagtgtaattactttctaaggcccttctagctatgatttttttggaactgtgtgaatgtagtatattcattagtaaagtttaatgcattaagcattaatttaaaatttgagaacaatgttaggcagataaattatttgccacatgctgtaatggtcatgttttgaatttatttcgttatgcagtatttgaaaaatgtctacataaaggaaaggaaatgagtataattgagtcaatatatttttaaagcaatttttataatttagcagacattgcatcttaatataattcactattaaaatgtgtccttgtggaaatatcgatgtcattttctttctatttcttttgattgatcttgtaaaataggttcctttcctttgttaaatgttctgtttatttttgatacattattctttgcacctgtagaatgtacctgttactctttaacctttttctctaccccagaatccttccatcctctcacacatagaaaatgtttcaatgtttcttaaaattcatagtgtctgaatggtttctaagaatagacagagacacagaaatatttcctcattttctgggaacatcctccaggtctttgttattgatagaattcactgaagtttcttccccctttctttcccctccatcactccctggccttttctctctggcctgttcttgccttgctttggccttcctcctcattttccctcagccactccttcttttgtctatctgtataaccagtttgtttcttttaggtggaaaaaatgaaatgaaatcatacagctgtgacctgaattgtattttcctgagtagatttctgagaattgtgaatgaagcgggcccattttcagttacctgctttattgctccatgcagaaaacctaaaactgttgtgttgtatgttattgtactttaacttgttgcttaatttctacatgtttattttcagtaatggctgaaagtgttaattattccatattttagcacaatgtgctgcatatacttcccaataagcaaataaggttacatttgtacagaatttcacttttgattaaatactgcctgggtttcaagtcccttcccccatttgaaatgcttcctttttaatgttgaaactgaaaataaacagttactgaatgattttgaatttacctcatcttagaact

SEQ ID NO: 35718 - DNA, 1144 bp, Mus musculus
atgcagtactttgtttcgtttgaagtttggcttttaaaggtaaaatatgtactttttattttggtggtattagaggtcaaatatggggtgtagtttgctggacaaactttgctttactgcagagcacccctcctcctggtgttttcaatggagtaggtatatattttaggtatatttataaattcaatggtaaacaactctgtagtatgaatttagagcttttaaaatactaaagataaaaaaatatttgttgctatgtgactttaaaatgtatgtaaaactcaggtattcaccttttaaaattattgggcaataaggcaaacttatttagaaagaattcatatatatgaataaactagccttcttatttatagatgtactaattgagcaatattctgcattttatatatgcaagcttcttgtattaacttatgaaattttaatgatctatttttagctccttcctgctgataattgtattatggatgaatacaaacgagaaattgtggaagctaagcaaattgtaagaaaactcacaatggttgtgctgtcttctgaaaaacttgatgaacgagacaaagaaaaggacaaagatgatgagaaagttgagaaggtacatccctcaggccagcaagacttaccttgtttagaattatgacctttcatttctcatggttaatcaccttatggagtatgttctcttaattttgattatgtgcaatttgatttaggtattattcatttgaactttaatatgaatgataccttcataaagaaaactctttttcttatgaatttcaaaataaaagaaaaaaaaaatcacaaaatattgattttatttttctgtttatatactttctttttaatcctaaagggattctcaaagatgaatgaattctagtgtctcttgtatggtatagcattaagtccaacttaatttcatatttataaattataatgcatatgtatgttctaaatgggaaaatgcaacaacaacaagacaataaaacaaatgcccaaaagatcatattttgtttttcaagtcactgaaatttcaggcaattactgttaagtttcctaactttttttgatgtacagtattatgatacttaggtcaagttttaaagagaaatatctgtattcc

SEQ ID NO: 35719 - DNA, 1668 bp, Mus musculus
ttagagcatgtgtttggcattatgtgaagcccaaacactaaaaaaggagaacaaacaaaagcgcagactttaaaactcaagtggtttggtaatgtacgactctactgtttagaattaaaatgtgtcttagttattgtgccattatttttatgtcatcactggataatatattagtgcttagtatcagaaatagtccttatgctttgtgttttgaagttcctaatgcaatgttctctttctagaaaaggtggacaagtcctattttccagagaagatgacttttaacagttttgaaggaactagaacttttgtacttgcagacaccaataaggatgaagaatttgtagaagagtttaatagattaaaaacatttgctaacttcccaagtagtagtcctgtttcagcatcaacattggcgcgagctgggtttctttataccggtgaaggagacaccgtgcaatgtttcagttgtcatgcggcaatagatagatggcagtatggagactcagctgttggaagacacaggagaatatccccaaattgcagatttatcaatggtttttattttgaaaatggtgctgcacagtctacaaatcctggtatccaaaatggccagtacaaatctgaaaactgtgtgggaaatagaaatccttttgcccctgacaggccacctgagactcatgctgattatctcttgagaactggacaggttgtagatatttcagacaccatatacccgaggaaccctgccatgtgtagtgaagaagccagattgaagtcatttcagaactggccggactatgctcatttaacccccagagagttagctagtgctggcctctactacacaggggctgatgatcaagtgcaatgcttttgttgtgggggaaaactgaaaaattgggaaccctgtgatcgtgcctggtcagaacacaggagacactttcccaattgcttttttgttttgggccggaacgttaatgttcgaagtgaatctggtgtgagttctgataggaatttcccaaattcaacaaactctccaagaaatccagccatggcagaatatgaagcacggatcgttacttttggaacatggacatcctcagttaacaaggagcagcttgcaagagctggattttatgctttaggtaaacttcaccagacaattactttccaaatgtcacagagctcctgctcttttagtctttagtttgctcattctctggattcatgttacatctttaatgtaactactgaatttatgttaaaaggctatacttttatgagtcagatctgtgttcaagtaattcttggctgggggaggttagagttgagagaaaagatagtatcaatttctgacagatagtggatctattagtaataaataccgtctgccatttattaaatgtctactctgtatgctcaaaatatttactacatggattttctctaagcttcaccacaattccatagaaatagttaaccttagagaatttggttgattcttggtaaatcgacatcaagcttagcatggtgccacatacctgaaattccagcaatcttagcagccgaggtagaataatgagcatgagtttgagggcagtttgggctacatcgtgatgccatctctcaaaaagccaaccaaataaaaattaacgtctgccttta

SEQ ID NO: 35720 - DNA, 3529 bp, Mus musculus
tacaagaggagaagctttgcaaaatctgtatggatagaaatattgctatcgtttttgttccttgtggacatctggtcacttgtaaacagtgtgcagaagcagttgacaaatgtcccatgtgctacaccgtcattacgttcaagcaaaaaatttttatgtcttagtggggcaccacatgttatgttcttcttgctctaattgaatgtgtgatgggagcgaactttaagtaatctgcattgcattccattagcatctgctgtttccaaatggagaccaatgctaacagcactgtttccgtctaaacattcaatttctggatctttcgagttatcagctgtatcatttagccagtgttttactcgattgaaaccttagacagagaagcattttatagcttttcacatgtatattggtagtacactgacttgatttctatatgtaagtgaattcatcacctgcatgtttcatgccttttgcataagcttaacaaatggagtgttctgtataagcatggagatgtgatggaatctgcccaatgactttaattggcttattgtaaacacggaaagaactgccccacgctgctgggaggataaagattgttttagatgctcacttctgtgttttaggattctgcccatttacttggaatttattggagttataaatgtacttatatgagtatttttaagtgatttcgtcatctcctaaaagatattgaatggtagactaccatctaaccagcatgtactgacatggaaaggcaacacagatatagttaagtgtaaaatacaaatggcaaaacactgtatctagttggagccaaatcagcttgtgtgtattttgtatctgtacaggacaaaaaggtttgaaaatataagtatcacactcttaaatgtattttttcttcagggggtggggggtgggtcttagaggggcttatagagcccttcactttattttttcatttttttctgtttaaaggttttataagtatgtattacttttataatcagagttcttagtaaatatgttgctgatttaaaggcttaggcatgttcaaacgtctgcaaaactacttatcgctcagttttagtttttctaatccaggaaggcaggccagttaacttttctggtgccaatgtgaactttaaatgtttttattttacctgctttgtggatgaaaaatatttctgagtggtagttttctgacaggtagatcatgtctttttatcttgtttcaaaataactatttctgattttgtaaaatgaaatataaaatatgtctcagatcttccaattaattagtaaggattcacccttaatccttgctagttgaagcctgcctaagtcactttactaaaagatctttgttaacccagtattgtaaccatctgtccgcttacgtaggtaaatgtagacgcctggtgtatatggcttgtagttttagtgttggctctccgtgttgagattctttctcagtgtcattctgtgtcctacaagtttcatgtaggtttcgatgttaggatggttaagatgtatatagtacaaaatgttcagtctttgattgttttatgtttgtttgttttcatgactagtaatggtagtggatactttaaaaatattttctgaagatccttaaaaccttggaaattgtaacatactgagaagagtggttgtttgaatatttttaacaacttgtataagtcaatatgaatacaatcaaaagctaaagtgcttcatagaacacgggatttaccttaagtaattatcatgagagacctcttgtaaagactggtctattttactacagagaacagtttgagagtgaaactgttacaatttagactttttgttgtattttctaagagaaagagtattgttaggttctcctaacctctgttgactactatggtaagtgatgttattttaattgcaaatttaaatagaaaccaacagaattaagtaactgactgtctctctctctctctctctctctgtcttcttcatgaaaatccttagttctgtatactgccttctgcttagatttagttatatgatcattaggttacatttgatctaagttgactaagatttcaatttcaatttatatttcaagcattctgccagggaatagttttaaaaattgtttccaaggcacttcaggtacaagtcatataggtagtttgtttaatctagtccttagcctaggactcaaggactgaatgttttcaaataacacttttcttgttctcagagcctcagttcattaaaactcttttaaaacctgtgtgctgagagttaagcaagacctcttttcttgtcttcatgagttgcgaaattgaattcatggagctgatgtggctaacaagtttattttaggaattgtttagaaaatgctgttgcttcgggttcttaaaatcacagcactccaactctaatcaaattattggagacttagcagagctggtctgaaatcacactaaaaaaaaaaaggtactggatcctttccagtatggttgtgtaaaaaatggtcactcggaaggtcacagaataaccggctctgaatcaccacccctgagagagttcagtgtctgcgtgctgatggtcttttgctgtataaagttcattctagaattttgaagtaaccacccgttttactacatattagtcatgtgaattttgaagttattttgtaatagttactttcatttgttatttactgtgttgatcaagatgtgtgtgagtgtttagcatttattaaagtattgtctttcctcctagacttttgcctcttcctgtagttaggggtagaggtgaggtgagtggagtgactacaatgtgattcgctggggtaggacagtttgttgtcttgttagtcacagtgtgttgctctgttttttattttagtaagatttatattttgagctctctgaatggaaagtgccactgcaaccttagctgcatgcattgttcccattagacctaagtcttcctggacttctgagtccccagatactggataaaggaagaggagagatggagtagcctgtctgtcactgctatgagagaagcaagaaagtgggtagagaaatacttcacattttagtcacatcttctctttttaaaaaggtagccatcagtgaaggaaagaactagtcaaaaataggcttgacaacctgaattcagatccccagaacgggcataaaagcagccaggtcatggttagtgcactcctttaatcccagcatttgggaggcaggggtagacatatctgggtttgaagccagcctgatctacagagtgagttccaggacagggaaccctgtcttattcataaaagaaaacaaaacaaacaaaaagctgagcgcactagcccaagcacctgtaatcccagaatgcctacatgaaacaggaagtagctaggagaatgccccaaagctcatggtcagttaatggcttatgtattaatgaagaggcaccatggtaaacaaagtgggaaggtgagagcccaccaacatccacaagt

SEQ ID NO: 35721 - DNA, 1118 bp, Mus musculus
atcagagctagaaatgaccttagaaagtcacttattcacactaccaccaccaccttcattttattgttgaggcaacttaaaggaaaggtgattggcccgaagctatatagctgattagtgatagattccttactggaagtctcaggtgtttgtcaactcttcattctattacactcttatcagggcacagtaagtggtgctttgtagtttctacagtaagacggttgctgatactttcaaattaaacaatatgacagtaatgcttgagtggtaaagttctcttttggaggctgaaatttgcagatgtgagtacagctgtttggcatttactatgtgcttatgtattattaatgagcatttaagattactctgtaagtatattttatcactgtctatacttaccaacaaatttgcattttgatgtaataatggctttcgtgtaatttctgttttggcatttttgttatactttacctgaaaaaaaaaaagaccaattcttttgtcatgtgttgtactatatttgtgaatataattttatgactcgtttatggaaactcctttatggaattgctttctgctctataatctgtcatttgttgtagattaaagcttatttttctgtgaataagacttattcaataaagcactattctttaaaatgttatcttctttgtatttgatttgttttgttgagaggatctcatgtatcaacccaggctactggccttaaattccgtatggataagggcggccttggatttcttctgatcctctctcctctacttccttagtgctgtgactacccggtatatgaagcattgagaatcaaatccaagacttaattttttatttttattcattttattattattattattattggttttccgagacaggggacagggtttctctgtatagccctggctgtcctctatctcagaaatccgcctgcctctgccttcggagtgctgggattaaaggcgtgtgccaccaggtacccttacctcctggaccacacacaggcacataccccattctgtgatacactgcacatatcagccaggtggtatgtccatgactttaatcccagtactcaggaggcagaggcaggcagatct

SEQ ID NO: 35722 - DNA, 1159 bp, Mus musculus
tgctctttcagaggtcctgagttcaaatcccagcaaacacatggtggcttacaacaatctgtaatgggattcaatgctctcttctggtgtgtctgaagacagctacagtgtattcatataaatgaaatgaatatttttttaaaaaagaatggtttgaatacccagtgaaattccactggagaaaaggaaattttcaattcaaagttgctgtcaattggaaatagcttccaggttagggatgggggcttatttctacttccctgccagcactgggactcagtactgtgcaggccctgtgcatgctgccacagatactgtgcgttcatacatgcacatgtcctattgtgtctagaaggtatcttctatcaccactgggtctcagtctttctgctttctcttccacacagttccctgccccccccccaacccccaacgtgggggatttgatagaaacatcacatttagaactgtgcatttcaaggtctcttattctctctgcacattttcaacgtgtttctctgtcttcgttcccatctactgcaggaagaagcacctttgatgatggcttggcaagacactgatctatgagtatagtagaacgtcattaaaagtcatttcattgttctattccattagcagcagagcagcagtattaggtgcatgacctgtctagtctccggttcttgtccacccgagcagtgtcagtcaggcatgtgtttcatcatgtgcagtgggccttaaatattatcagatagtggttgtttgtcctacaagctctgtgccaccattgcaccagtgtatcttgtaggcatgtcaccattgaagatagaggggaaccacttgtacctgggttgttgtttgcctttttcctctggaaacgtgctgagtgctttccagtgtcatgaacactagtcagtttggatgaaggctctaggtaggtaccatgttcaaggagaaattgttggtgttgtctttagcaatagggtcttatcattagtttgtggagagaaatcaatagccttgccaataaatagcctgctttccatggtgcccctttggccaataactcaattagatataacccattcctgtaccagaggtttcatttggtagcatgagatgtgtagttggggctttctctcctgatacttggtgatta

SEQ ID NO: 35723 - DNA, 1191 bp, Mus musculus
ttatataaatgtttttctttatttcagttatcagcaaaccatgctcatttttgtatatcgctgaattcaattttgtagttgttggtattctttctcttttaatgaaacatacttgtctttatagtttcagaaatgaataatattctccaaattctttggtttcatgatgaagctcaacccttcaaccaatttggagaatattattagtctttttaaaatcatagtataactaagaattaagaaaagtatatagtctttttaaaatcatagtataactaagaattaagaaaagttcgaaataagcaatgtagttagtctttttgtaaaataacttttaaggtaagcggtagtataatggttgcctttatacagcacagtccagcagctctctacactttaatctgtttgttcccccgaaccagattttgttttaagattttaacatggtccggacagatggtttgttcttttgtcctgaggctggtgtgctatttgtctaagaggtttcccttttcaattgtagttacacgagcatgcagcttaccttgtggacagcatgtgggattgtgctactgagctcctgaaagactgggaatgtatgaatagcttgttattagaagagcctcttagtggagaggaaggtaagggcatctcattattttcttctttgtccgtactgttttggaatagatcttgcaaattctgcacattcttattaatgttcattttctatcattgtttttgggagtgttgggaaccaaactcaaggtcttgtacaatgtggaacgaaccctaattctgaaacatatttcctgtctcatattcacatatatgaatattgtatgatgtacaaagatttaatagctatcaaaatttagtgtttttagccaggtttgatagtgcgtgtatacacacacatacacatatatacacctatatatcgtgtgtatatgttgctcaagttcatactttcttttgcatatatatataaacagcaaacttaatcagaattctgatatttagaaaggtgagatttgacttgttctagtcttttctgtgataagaatggattctcttttgtatatgaggtcagtctctgtgcatagacagaagaaacttacataatagttacaagaggcatatatcgaaagaaataggttaactctttctgattttcttttttagctctaa

SEQ ID NO: 35724 - DNA, 1153 bp, Mus musculus
tagggtttctctgtgcagccctggatttccagtaattcactctgtagaccatgctggcctcgaactcacagagatccttaccttgagagtgcaggaattaaaggcatgtaccaccacctgggcaattattttcatttttcttaatatgtaattaataattcatagggagaagaacctgatgaagatgacgcatatcaggtattgtcaacattgaagaggatcactgcttttcataagtaagttggatctgtgagtttttgatatatagcaaaataaccttgtgtattttgtgtgttattatgctttcaatttctcttcctcctcctcctcctcctcctccaccaccaccaccaccaccaccaccaccttctcctcctcctcttctttttcttcttctttttaagaaggcatgttatattctgaaacaactatgcttaggcttagtttttaaaatttgaatgttttgttttttgttttttgttttttttacagtgctcatgatctttcaaagtgggatttgttcgcttgtaattacaaactcttgaaaaccggaatcgaaaatggagatatgcctgagcaggtttttatttatttctgtgacatatctactggctatgctgcactttgacagtaaaaggttgtgacttaatttcacccctcatcctgtatttctttttttagattgttattcacgcactgcagtgtgctcactatgtaatcctttggcagcttgctaagatcactgaaagcacgtctacaaaggtatgtggtatttcagccgcgttcttgctaactcgtacccctgattttcagcccttttagacttttagcaagagcaaagtcagcgaagtcatacgtatttctactttactctatgtagtcatagttctagtttgcatattcaatgaaacattgatatgttttatgtcaagggatgattttgccggatttaaagtttgttcacatgaaaatattacataatttgactctgtattcttaatattgttaaattcttaaaatatgtgaaggtaatttttaaagatttatttatgtgtacggatgttttgtctgcatgcatgtttgtacaccagaagagggcatcaaatcccatgaaactacagttaaagatggataattgtgagcctttgtgtag

SEQ ID NO: 35725 - DNA, 1127 bp, Mus musculus
tcactttggatcaagtcttagaattacttagtaagaggatatcaaaattcaaaagtttttgctactttatgatgaaagtttatgatgtgaagataaatcacttggaggtaaacagcaccatggctgtaactcatgagacccagcaccgcattcatcaccagcaccacaaacagagcagagttgtctaaaagcatgccttgactttttctttccttgttgttacatgtgttcatacccaattaatattggctgattcgtatttggataaaagtaacccattaagtttaggacaccaatatgatttctccatttaaagtatattattgtgacacagctgtgcctattcgtatcttgtttttttgtttcaagtgtcatcaatgcagtgtatcatttgtcttttatatttcaattagaaaatgtgcttaaaatatgttaatttatattgtttctcttctttttccaaacagctttttaatgagatgatacaagagaatggctataattttgatagatcatcctcaacatttagtggcataaaagaacttgctcggcgttttgctttaacttttggacttgatcaattgaaaaccagagaagccattgccatgctccacaagtaaacactctccctaatactttattcattgcttgtattttcaagaatcttaattttgtgtccatccttttgtttggaatacctaaataagcttgttttattattggcttataaagttcctaagtttaaagaccattgtaatgtggtccctcccctgcacttttataaatatacatatgtgtctatgtgtgtacatgggtacacttgtgcaaactgaactcatgtcgtcattcagaatactatccatctcctttgaaacatggtttgtgcctggcctggagctcaccaattaagctagtgagccctaggattacttgtgctctgtcacatgaatcgcacatacttattgcttttacttattttatctaattctctccacgtttaatttactttcttacttcaccttgttgtatgccttttagtatataggttataattttaggtgccatttaaaagctattcatagagtaattagtgtaagaagtacatttttttcctgtgctgtcccccc

SEQ ID NO: 35726 - DNA, 2666 bp, Mus musculus
ttatgtttgtgagttaattgacaccttaatgaatactgctgttattttattatggattaatgatcattttacttttgtatttatatgtttgaagagatgttttcataatagttttattaatattttagcataacagtgatgaagtataatatttacagatttttattaagaaatgtgaatgactattttaacgagatttttttcccctctctcattaggttcttggggtgtcaatgttttaatcccagtacacatttaaatctgtggtgaagtcgttttctaagtggaagaggaaatttgaaaataaagtgtggtagatacagtgaaattctgtacagatttttctctaaggagaatataacatgcttatgcttaccaagatgaagtgcattgaggggcagttttgtttgcctgaaaaaataaaggacaagtaaacaatttgatgataagctacagtttttcttagaaagtaaatattttatttatgcgctgttagttggcttttaaaggaattatttcatgcttttttaaaaaatataacaatctgaagaagtatttggtacagataagaatcttctcacatttatttactggttgtactaaataatgatgacctctgctggatttctgtttacatccacgaaacaaaagttaaggatggatttattccccgaccctgaaattgtaggatagaattgtttttagcattctaaatttaaatgcttaaaacatcaatcaacaaaactttgttttaaatgttgtaattgtggaaaaaaagttaaacttataagcagaacttttacaattttttcatctaaaatgtattttaagatatttttaaaatccaagagcttctgtatacttttcagaaatatccagatgcagtgaactgccagaaggtaaccagtcttgaacatgcttatcccatagcagccctgaacgtttgcttgtcctttaagataaaaatgtaacgttgtgatattccttccagtagtgccactgtattttgtctccaaataaaagaagcttattgtagtatgtttgcagaaaatttaaacaaaaattatacagcttattagagtgtgggaatagggatctaaattttaaataaaattatatatatatataaattggtgctgattttataattgcgcagtttgtttagttttttcttacttttaaattccaacttaaaattatgaggtttcagaaatatattgaaagtttaacaatgtttaaaaatagaaaagcatgactgttcatgctttaaaatgatttttaaatttgtattttatattgttttatctatctgtctttgcaagcagtcttcaggttaaagatacttctaacaggttacagtacatttcctctgtatgtaaattagatgggataatagaattcataacccataatattctttgaaagctaagctttaaacttcattttatgtcctttcacaagtgaattagtttaaaacagaaagtggccacttgccattttgacatcgactcattttgcgaggcttaggcagctagacatcgtttaaaacaaaatattaacttatattacatgtatatctatcttttgtcagtcgtctctcagttcttgaggtatattattttaatcattccatgccttaatatgcttgcaatacaagaatatcttcagatgtgtgaataccaaaaggtttctggtttttcgagtcaggaaatcaacaagcattgggctgtggtagccaaaaaaccataggttaaatgaacgaccacaacatacatttgttttattaattaatggttaacaaataaaaccagacttgtctaacatactttccatcaacaaccattgttacgtgcaaacatattgcatatgttccttcacacaccactgcatttcctagaactgctgagaggactgtatatatgatttgaaacctaggttgatttcttttctcactcttgaaaggagtatttctttgtgaaagcagttcttccagctttgttttgaaccagctaaactgttttctatattactctaacctgttgtcctccacattctattgtcctaattgtactgtttgctgatttgtatttatgtcttgagacagtaactttttgaataaaaataaacctaccgtgtgttgtatgctttatctcttgtaatcaaagggggagggtggtttcaaatgctttacaaattatatttattatcacactctaatgtgtttgagtgggatcatttatagaacacatcaccagtttatatttttaataaatcacatatattttaaatgtgactaaatccctagttgggttgtttaaaatagaagaagcctgtagctcttactgttttcattttcatctggtgtagattaagcacactttgaactgtctaccttgttcatttaggatagatttaaatgccaactgtgtcagatgtatgaaaaacgtttttctatcacaattcaatgtaaaaaacacaatcattaagtttgaactaagtgctagggcaaaaatctagcaaggagtcctgatttaagaaaatctattttgggtaatgggctcatgatgtgtgaaagccagcatttaaaaaatatttattactgaaaattgcgtcttctgtgtgataaaatttgcattgcacgttttaaaaagttaccactgtagatg

SEQ ID NO: 35727 - DNA, 1219 bp, Mus musculus
acattgcagttacaaaattgcaatattcatgctgccaagaaaaaggaatggagcccaagtagtaacgcctgcaaagtgaagtatatattatagctagccgcaattgcaactctacaactctttgtttttgttgattttaaatgtaaagttgtgaatgacattaacacatatgaattctttggatttaaaatgcttatagaatatacatgacatatctaaataaatttcagttctattacagtgtaggaccaaactaaaaaataaacaaataattattatataactagtagttaaaatcccatatataaagataaaaagcatttttaagaaagaagtgtattagatatccccaatttggaattatattgaagacatgctcacttattggcttattttgttccattggtgccttggctagtagcagaaatacaagagggattgagttgattcaagtcttcaaagattaggccttaccatgaagacatcttttaagaaatgtctcatcgtttctcagccttttggctaagatcacgctaagatctgtttttattagtttaatatctgatatgtcctctatctgaggacaatatattaaatgggtttttggaagtaggagttggaataggagcttgccccacccacgccacgtattgacctggtattgaagtacctccaggaatggtgcaaaaaaaaaaaaaaagtcttatatacattgacatgaaattatcttgaatccagtgtatatccatcacctaaatatgacctgtgttttataggctgcattttaagttttcatctgctttaaaatctctatttatctccattttttcattttgtgctgatgacagtgtttctctatgatcaaggaaacatagttgaccttcacctggacactcttttttctgttcactggatgagaatttcagagtctaagcaacatctacatattcaacctcttcttttccactaccccatctattttgtagcctataatatcaaaagagaagcatccatctactgggataagtctgatttttctcccacatcatcttttagccttgactttgatccctactgctttttaaaatcttctataactgtacttcctgggactaatgattccagaggtttcagaaaatatttcttttgatttccaataactttaagcccagttaagtatcatacccatgatgctatatgaggtatcccacttaatatc

SEQ ID NO: 35728 - DNA, 1462 bp, Mus musculus
ttccatgttccagtttgcctacttttggaaatgtgtcattcatgaattgtgatcatggtgtatgtatatagtttgtatgttgttggtgcgaaactcacttttctaaaaagtttattatgtggaaataattgtcgtagaatcttgtgtttctatcaaaaatctcagatgacgaggatggtttaggtattcaagtattctgctcatttgagtgttgaagagtaatccaaaactcagtgtttttctttcaagccttattttcatttttagtctctgtcttcatattgatcaaagagtgcacttgttttcacttcttgccttagtactatcaagacttgtggatatatttgaatgctgtcatttgagtaaatttcacagagtttcagtgccatcattcgacacagggatattaagtacataaatgtagaatgtatggcagacagggcagaaaatatactgctctaaggtatagactggatatttttgctgttgctatttttaataccaaatgttatatttgagcatattttaaactttcaaaatctgcttgtgagttaaattgaaagaaaaaaaaagtgcaaaggaagaagtctgagcctatccagctcactgtgagagaaactccccctttgtaagctccaaatgtttattttgtgaacttgaaagattcatacttcaagtagaatagatctgttactaaacctctggttctatgtcttgaaatgtgataatatgggatcttgacaatgcagtataattttcaaatagaggagctggggattaaaaagataggtctgattaaaggactgtgcagttcagataaatagagataatgggatgccgtgcggatagattggttttctccctaggtgagaaggctgaaaatgagaaaggagccaggccttgcttaaagctggttaggacgtgttaaccctggattggtattgggtcatgattcctttttcttaaacatcaaacatgtattttgcattggtgttgatacactacatgttgttcagtcctaaacctaaattgttgaaaggatctaaaggtgagtcaagaatacacaatggtcagatttttggtttataaagattatgcaggtctatttcatagaattataaagttttgcaactaatctgtgcattttcttgcttgcatgtatgtttctatctctgctgcaaatgatttaaaagcagagattgtaaactgccctcttttctttatttgtatactaaggccgaacaaaggcaatcagtgattatttgatgatttttcttttgccaatggaaacctgcactacacattgtaataaatatttgctgttgcataataaagaaccttgttctgtgttccccacctctgtttttctttaaaatttccctaattcatttacaggtcttgctatatagtactacatccattcatcaatgaggtaatatatgatgcttaaaagttgtgtatg

SEQ ID NO: 35729 - DNA, 1125 bp, Mus musculus
tatgcagggagcgactgagcccccctcagtcttccttgaaaggctcatggaggcttataggagatataccccattcgaccccacgtctgagggtcaaagggcctcagtaattatggccttcattggccagccagctcctgacattaggaagaagttacagcgaattgagggcttgcaggattacaccataagggatgtagtaagagaggcagagaaagtgtatcataggagagaaacagaagatgaaaagttagagagagagaaaagagagaaaagagaagaggaggataggagagacaggaggcaagaaaaggttttgactaggatcctggccgcagtaggagaaagaaataatggaagaagaggtagacagtcagggaacctgggagacaaaaggcagcagggaccaaggagacccagagaaggcgggcagcgtctggagaggaaccaatgtgcgtattgcaaggaaatgggccactggaagagcaactgtccgaaaaaaaaaaaaaaaaaacaagaggtaaaggtgctttctcttggggaagatgaagactagggggaacggggctcggctcccctccccgagcctagggtaactttaaaagtggaggggacccctgtggactttctagttgacacgggagctgaattttcagtactcaaaacacctctaggaaaagtaaagaaaaatgaaaaaaccttggtgatcggggccaagggacaaaaatcgtatccatggaccacatcccgagtagtagacatagggtgaaatcgagtaactcattcgtttctagtcattccagagtgtcctatgcctttattggggagagacttactaaccaagttaaaagcacaaataactttcacctctcatcgaccggaggttttctggggaataaaagcgccccagactctagagctgtctttacaactaggggaggaatatcgactttaccaaaataaagtaaagccccctgagggattacaggactggttaaatcgataccctcaggcgtgggcagagacgggaggagtggggatggcaaaactggtcccccctgtggtgattgaacttaagtccggggccacccctataggggtccgacaatatcccatgagcagaga

SEQ ID NO: 35730 - DNA, 1142 bp, Mus musculus
aatttaatgctattttccaatgactctgtttactgactggtttctaattctaattctgattttcagttccctctacttaaaacagagatcaagcttagatatggactatgtttccagtatttatctataaattaatgtcgataaatttaagccaatatactagttgataatcacaaaattaggcttcttcctcggcgctgcctacgaggtggctgccatctgttttgtggaatcatggctgccctccggcctctggtgaagcccaagatcgtcaaaaagaggaccaagaagttcatcagacaccagtcagaccgatatgtgaaaattaagcaaaactggtggaaacccagaggcatctacaacagggttcggagaaggttcaagggcgagatcctgatgcccaacatcagttacaggagcaacaagaaaaccaagcacatgctgcccagcagcttctgcaagttcctggtccacgatgtcaaggagctggaagtgctgctcatgtgtaacaaatcttactgtgctgagattgctcacaatgtgtcctctaagaaccgagaagccattgtagaaagagcagcacagctggctatcagagtctccaatcccaacgccaggctacgcagcgaagaaaatgaatagatggcttgtgtgcatattttatgtttaaataaaatcacaaaacctgaaaaaaatcacaaaatttgtcattttaaatttccctttaacaattatccagactgatcacatgaaagaatgattatgcatcacttaatagcaagtgttatgatttaaaccttcagatgattgttctgcaaaagacaacaattgattaagacaatttggggcattattacttaaacatttttctttgataatttccaacaagaatatattgaattctggtctcattcatcatcctacttttgcttctcctttcccaataccaatcctctcttttcatctattatatattcaactttcatgtttttttgctttgtttttgcttttgatttgtaaaacattcactggtggctacatgactaaagacgacaatgactacttctcttcaagcaattctcaactgccaatagcacgtccacatctatgactgaattctaaagtgttcttttacaatttct

SEQ ID NO: 35731 - DNA, 1145 bp, Mus musculus
agtgcaccatatttcatcaaatctatgatgctttctgttgtaagacaaaacttttttgtgctactaagagatatgatgccaagtatcatctgttatcagttgtaaaatacatcctgatttcagaggtgctaatggggaaaagaaatgtgcatcatagaagatatgaaatatggtgtgttaacatttaccttaacgttattaaataacactcacaaataaacatttcctcagaaactttaaatattaagtagttctttaagataaaagtacatttataagccatgtgtaagtagatacttgatgactatttttgatggatattttatgtcttttcataaaaagaaacacctttaaaagttattttacattgggttatatagtttgttgggctatatagagcattaactgtgagtctaacattgaagtgaatattcatgttaaaaattttaatgcatttacatcctagatttaacattgttgggccatttaaaagtgtgcatattggagcagaacattaaatctgtttccattttagtcacagaaaagaaaagcagagtcagctactgagagctctggaaggaaggatgtcaagaaggtgaaatcctaaagcctagaaataaagttttaaatgggaaactgctattttcttgtccccatcttcaaatgctaattactacttccagtgtattcatggtactctaaggaaaaaaaaaaggaatactctttggttttgatttcttgcatattttatatattttacaatgctttctacctgaaatgtgtagctttctattttatgcattctagtattttctgtactgtattttgtgcatttcatgtcttcatcaaattcctctcagtccttgtttttttgaagcttgtgctgaggttttagcttttctatgttttctatgccgctgctttgaaagagaacctagattctatagctgtattattgttgtttcagactttacatttatatggctgtggacaaaatgaattaaaacgatttgaggagaaagactttctcacttctttgttgctttcttttctatggagtctgggtttgtgtgtgtgtaactgcatactgtgattagcataatcattgtttctttgaggtcatctacatactttttcctaaggaa

SEQ ID NO: 35732 - DNA, 1163 bp, Mus musculus
tgtttaaggaatgaatagaagggaattttagagtcttgcatttcatacttgggagccaaattcattcgtgtctgcataaaaataccagtctaaaatgagaaagcagaggacatgcacacaaagggtatcaagggaacccatgcaggaattgtgctatctcttcagctgctagtattcttttggctggcccaggaatgagtctttttactcatttagtaacttacatgtatgtgtgaaagtagcagcacccttctttggtcaaagacatgaaactgtacatgaaaagctaatgaatgagttgtctgattcattgattcaatgcacaggaatgtctgagatatgccaagctctacactaagcactagaaatactgtaacagaaagatagccacagtcccagccaacaacaagttcccttcggctgtaagttcttcagtctggtgttcatacagggaaggtatgtaacttgcagtacatgctcttaaaactgtgtttaggatatagactattgtacattctttacgtgtgtgaggcagtttgggtgttcaggtactgatcacctttcagcccttgagcaacatctagcaatcatgatgctaagatcgggtggactcgatgcagcaagtctgataaacacagattatatttgtgtagcaagacagcaatgttttgttgctagagattaggcattttggtagctgttcgttgatacattcttctgtgttctaggttaataatccagttgcatggaaaggaacaacatgttcaagatatcattcctataaatagccacttcagatgtgttcaaggtacttgctttaatgacttagctagttttataaggcttctccttagccgttaatgcagtgtataatgtcacacatactcacatttgtcactgcatgtaaagtgaaatatattactcttcacagaaaagttaacacttctaacctgccattgaaaagtgttgtgtttaaaagtgccgaagaattatattttaaaatacagatgtatatatcacctgtttccctgagtagagctggagatttgtgtaagtaatcttctatgctgatttgacatatatgtggatttaaagtactgtcttgggcttaaccaacattatgtctgttatgaaggatttatacacatttggcaccttttttt

SEQ ID NO: 35733 - DNA, 1219 bp, Mus musculus
gcacctcctacagtgggctgagccctcctacattaatcactagttaagaaaatgctctacaggtttgtctgcagcctgaccttttggaagcattgtctcaattgaggtttcctcttctcagattactatagttttttgtcaagttaacatctcataccataaaaccagcgcaatgtgtatgttgtactttgtgctgatttcctctggttgctctggtggaagcacggagagggcaattagttggactattgtgggttggaatttagccaaatcggtgctgtgggagcccagaggtaaggcagcagacaataatgatgacatctgtttgagaaagggggaagtgaaagcaagaagggttccagggatggcaaaagaagggattaatggggccaaggttcctcaaagtcaaaaacaattacagaaaagataaggagcaagtatattgggaggactactagtcacagtgaaatgtttgatttatgttgcatgttaggggatggtacttctgtgatggaaaaatctaggatattcttgaaggagtcactgcagagggtgaggcaatggaggctgaagtggagtgggaaggccactgggtgaagaaggtgaaggtggtaactggattctctgtgccaatttttaagcgagaatgactaatggcaggcatttgagtggaagtagagtcttatgtagtaggcattggattctgaactctgaggtttgtagagagtgatggtcctgtagaggaagaaagagaagatggtatagcccagtgaatgagcctcagaagaaagcagtttcctgacagagatggagagggagtactctataggaggtattgaactgcatcatatttaagccaagcatgatagtacttgtctatagtctcaaatacttgagaaactgaggcagggggatcacttgagaccaggaattaaaatccagtctgcggaagaagtaacctgcttggaaactagtcagtttgcatttgcctctgatttataatgtagttatgttagaatccctaacaagtatttttcttaaattaccagtgaagtcaggtgtagtggcagctgcctataattctatcctttaggagcctgaggcaggaacaaaggtttgaaatgagcctgggctacatagtgagacatttctgggcttcctctccagatagtctttttattgtcgtgaggtggggcacacatattagtatgccctaaaa

SEQ ID NO: 35734 - DNA, 2616 bp, Mus musculus
cagcaaaatccttttagacatatattgccaagccaaagttaccatatttcggtgtttttgtgtttactctttgtaaagcaaagaggtctgtatttacacacctttacctaggggtatgttttctgccctgcttcccagtcctcatgattatctttaataccctaggcctggattgagaggccttcctgttctaagcctacaagtactacttgctatagctcagacttgtctacagttctttgtatgatgcactttggacccaccctctcctcatgtcactactttgcacacttcctccatgctctcactttgaaggaagcctggatgaggctagtgactctgtgggtgtcctgaacagtgaagttcactgtctccatgtgattgttacaagcgtttgtgcagttctactacaatgatatctgtatgtcactgtaatgttggccttcgtggggaaccacacttggtggagcccgattcccttgtctcagaccatggttagttacataattttatggactatagagatggcgtcccactgatgtgagaaacatcacaacagcgaggaaagcactgtgagtatatcagaatgaaaacatccctgcttcccagtccccgtgcccggctactatccacacttgacatgcggagcaatcctgcatgttggtccccatctcccccactagaaacccacttccagagtcatgtttgcatcacagtcaaaagagaagtctgtgcacctcaagtgaggtcccaggagctttcctcgccctccaaaccaagcattgagggtaaccctcagaacccattctcctatctcctaaagtgtcggggaaagttactggcctctctcaacagggctcactctgagctccacatccgcctccttcaagcaaagacttaaaaagactgcccttgactccttgacactatatcaagtgctgtgtaagagagactggtccgtgggaccagccacacacattacctcttccacttgaaatgactctaaggttttcattttattcaagctttgtgggacagacaaactttttaaaaattactttgttgactgacaaaccagctgccagcttctggctgcaaaactgcctggtgaaattgacttgcttggtttcattcaccaaaccaacccaagtcgtgtcattcttgcctattaacatctgatgtaaggcgctcatataggctgtgtgtacaatcttgggcactgattccatcagtagtatcttgtaccatccaaggagagggccaggaaaacatccaccatcaaatggttttccagctccctcatctcttcaaaattgagttcttgggagaacaaaaggtatgtatcctgcagtagttaagcccttaaataattgggagttgggaaatcggaatcaaagtattggtgccagctcactgaagatctgattgggtcaacagttgattagtggaagacggagagcagaagaattttgtcatatctattaggccagaaagtaatcactgaagaagcagatggtaggagctggagcaaggtggtccacaggggaatgcctctcctgtgcccattttataatacctcgccaagcttgggtctttagatgagcaagattatggttagtgggggctctgtggagcatgcacgtagtgcccttccttcatcaggccaaagcaccaagttgcttcactgcctcggccttttgtccagctcagcctgggatgtctatagggttgagggttttagacaatctctaggaaagggatacaaaacagatccgatggaagaaacctacttccctatcctgcctatcctgcccctcaacctcttcattcctaattcctccaaggtactatttcatagttgctctgaattaaggatttcaggtttaactggtagtgaaagactgcacctagcatcttcgggaagaaatgattccagtctattggctgatactacattagtttccctttctgattcttaatctgtagttctttgttatatttcacaaaaaaaaaaaatgtctcggtcactacgcaaagctgctagtggggttctgtattttgtgtcatcttttttattataatttattgcaattttatgaataaatatatgttgtgtgaaaactcattgtgatctgactgagaactgaagaggggagatttaatatcacttggactcacttgacatttttgtaggccccacccaaccatacctgtacctgtcactactgagcctacagagaaataccatttaaaattgttgtgctggggctgtagctccattctagagcgcttacttagcatgcacaaagccttggatttgattctcagcaccaggaccaaaaaaaaaagagtgttttcctgggctggtaagatgattccatgggctagtgtcctgagttcaattcccagaagccacatggtaggagggaaccgactccagaaagttgtcatctaatctacacatgtgttgtgacatggccacataaataaaatggggactagagtgatggctcagcagttaggagcacatattgattagttttggttctcagcacccacatctggcagatcacaactgctataactctatgtccaggggagccaagagcccacaca

SEQ ID NO: 35735 - DNA, 1209 bp, Mus musculus
ttgatcttggggcttttgggggatggagaaaggcaaagaaaggaaggagaggtggaagaaggaaggagagatgggaggatgtgtaggtgggatctatcactccaccaagggggtctcatctctcaccaggagccttttgtagcccttccctgaagggagaccctcatcttctctgcctgagcacatgttcttctcagaggcctctcaggagggagaaaagagaagacagaagctcgatattcacttatatatgtgtagggtagggggagtcaggacccccaagccccataataacctgattgcctattcatcctttcccaaagccttcctatctgctgctgctaatgctgctgctgctgcctctgctgccgtttcaaggcccaccctggggagcagggccaggcatagcgtcctcacctcttgggctagaagtgggagctggctggcgcctcttctactgctggtacccctaccagggaccgggccttctccgtctttgtcgtttctgcacctcctgccttatcagcctgccatggccagccccacagggaaagggaggggggaatattggctgagaaagaggagagatagaagcacaagaggggagtaaacgggcccagtgggctgtcttatttaaagtggttatgtgtatttcttatactaatttatatagagatattaaggccctttgagttagagaaactgtccccttcccataagtgtgttcgctatgtttgtaaaaattgttccatgtaaatatgtctttataataaagagttaaaagttgacagtttgcccttactctttgaggtcatattcaggagggcattctttttctcctagggccaatcttgtccctgtgcccacagattgcacgtgtagggaggtgagtgcttgtatcccaaattggttctaggtcaactggcctcaaactgatttgccacaagctcacaaaaagactcgctatgcttaagggccagttcacataaatttgagccccttttaagtcctttggcatctgttcgaatgtcctcatttttctggcagtgtcacttaaaggattttttttccagaagcaattcatttaaggacacgctgatcaaaggtgggatttgtactaaacgctgttttgtagccctggtgggtgccttctgttttatctgcttttgaatactttcgggactttttagccagtttgcctttcttgac

SEQ ID NO: 35736 - DNA, 1900 bp, Mus musculus
ctaggcctttcttgcctctcttccccttactctaagggcttctgtccttcaccaggaagatccacattgtgccacgctactccttgggagcaaatccttccagcttgtcagccatcccaaagcttctaggactttctagtcagaccagcaagccccaactcagttagggaatctgagactgggattctgagctctgctaccagaaggcataggaagatgtgattccttccccatgctgggccccagtcttctcttttgtaaaatggagatgatttctctgtttcctttatattcctgtgccagacatcaacctcttctccatgaatatcactataacattaagtaaccaccaaggagcagggtctctggcaagccccagaaggtagcagaggtctgaaagtggctggatccctagtccacagtgaagctagaatcctggggactacgtgatggcaagacttcatcttttggcagcttagccccaaccctcttccttttgcagctccagtacctgaaccgctactatcagaccattcgtgagaatgtaggcccagagctgcagcgtcgccagctgctggaggagtttgcatggttggagcagcacacggagcccctgtcagccagggcccctcatatcatctcctggacctctctgtgggtggcctctgcccttgccatcctcagctggagtagctagaggcccctgattctcctgtggactgttcacttgtgtctggggattcatttgcttctgctcagctgtcctctccctatgccatacatgtcccaagggctactgatggctcaccaccttgaagccactggccagatcccagacagtatgttctaccttctcccagatgtacatactttatcatgaactcccacccctgggccctgggatatcagagcctgctacagtgagtccctctctcccaaagtaaaggaccctatagggcaacacccagagggctccatcctatccccacctgctggagaaggccagagcttttgccacccacactgactccagacttttaaaaggtgcctctggccactcttacccacaggcctacagtagcctgtctgctgtatttggagaagaaagctactgggtagtctggtctcaaactcccatttgtagtattggggagaacagataagttgaagtcagctgtggcctggaactgaacacctcagtcaataatgtgtacctacctctccccatctgtgaacccgcagcttctaaactaccgctgtgccccttaacaatgaccacattgggagtgaaggctcaggatttagactatggaatggagggaatggcaaggtgctctggctatcccaggctcccctggtgcttggagcagtttaatcttctaaggtagagccgccatggcagtgctattaaagcctctcatatctttgaaaacctcttaaccttgtgtgggcagactctgattcccccattttatagatgggaaaactgactttcagacagaaggtgtggcctgcctgaagagactctgcacttggttaggggacgaggttgggagatgatggggccagatgggttggcattctagttcctttgcccatcagcaccatgccaagcctcttaccctacatctcagcccctgcctcatttattgaacccactgtcatcagtggtttctctggtctggccctgtctagccgttagccacctgggctcacatcctgctagatgcttaaaacaactttgcaaagatgcctgcctctggttttgcattgtgtctgctatagctgtactgggggaggctgctggtacctgtggcttttgtggtgggggaggaagagaagaggctgaggtgggggcagggatgtgaggctcccagaatctcagtagagagacacgtgg

SEQ ID NO: 35737 - DNA, 1232 bp, Mus musculus
cagaacccccagagccaccacaggaggcatccgaagctgagaagtagcctctctatggaagagacttttgtttgtgtttcattagggctatgagagatttcaggggagacaaccacctgagacagagaacaaatgagctgtcccttattactatttttctttggtctttagtcacccaattaccggcatcttcttgctgcaaactttttttttttaatgtttgaacttaagacagtggcagaagatgccagtcacatctggcaactggacaaatgggtctcttgggacatggcactggttggtttcccattgtctcagccacaaggtatccttggactcccctcctcttccctccagatcctagctcccctgctgggggtcattggtctctttctggggctaaagagtctcaagactgactccagtcctttccagctgctgcatgtcccgagtccagaggcagtcacagagacctctggccagggaattctaactgggctcttgactccttcagaactaaggattggagagggacgctggaggattctcctggctccaaagtgccagcattgccagccaatccttttaggaatagggcaggtaccttccacttgtatttatttctgtagcttctcttttctccccccccatctactctctaacatccaaatcccactctttcccccattagatgctatacgtaagtagtcatggtagagataatacatttctcctacgttctccagaaacttcaatgcctgtgctattctcaataagcattgatgagatgccaacaacacagcccctcacactctctgtctcatctcccctctttgctcatgagtccactttcattttctccttttgactcctgcttcagccgggagcaggactagcagtaataaaagtctgcactttgctggtttcttttcctcaggggaagcctgagtgctcacttaaacactacccctcagacttcttgtgtaaggcctacagaggccgtgaatgcacaaatggggaagccaaggcacagagaggctctcctctcctctcctctcctctcctctcctctcctctcctctcctctcctctcctctcctctcctctcctctcctctcctctcctctcctctcctctcttctccccacctctcccctcccctccctcatcatcccctcaaaacaaaagagagagaaaaaaaagactaatcagtacttccattaagccttggc

SEQ ID NO: 35738 - DNA, 1134 bp, Mus musculus
tatttgagatggggtcttactatgtagcccttgctggcctggaacttgttttatagactgggttggtctgggactcacagagatctacttgcttctgcctcctgagtgctgggattaaaggcatatgaccaacatgtcaaactatgttttaattttattaatgtgattattagtcaaatagacacttcgatttcacattcttgccatttttctttttaaaattttcaaaccaacacccttgaagacacatgtacatcacagagttgtatagcattcagtagatgtgtggcagataccgggtgtggtgtgatgttgaaatcctagtctagaagtgtttgcctggaaaagaagagcccttacctctcatggcctgcatgtttggagactttggactcaaacaaagaatagcagtgaattaaagctgttttactgattacagaagccaccaatggtgccgtgccacagggccagcgaccacctcctcgtattaagaatttccagataaacaaccagattgtgaaactgaaatactgttatacatgcaagatcttccggcctcccagggcctcccattgtagcatctgtgacaactgtgtgggtgagtaaaaccaaggggacattgcctgtgggataggctcagctgaacaaagggtctcacagtggacattggctcttgggaaaattcagtgggaatgagaagggagattcagataggaaacaaggtatatttagataggaaggaatctcctacgcagcagcagatcagctatactcatggagatatggtctcaaccaaaaagtctttgataaatggagaacaatacctgtttgggaaatctcagttttcctgtactggatccaagttgggtgtggcccactttacaaaggaggagaacggcatcatccactggaaggcacttctgagcaatgcctatggcagaagtggccctctttgtgttcccactatgtactaggcattgtgctgagtacttttcctttctctcattcaaggctcatagcaacccccagaaatcagtatcacccccattttacagatgatgtcactgaagtgcctttgtgtaagtttgtgtaattggcataagatgatacttgattcggtctgatgcccaagcc

SEQ ID NO: 35739 - DNA, 1182 bp, Mus musculus
agactgagagaattctggagatggaaatttaggaatttggagggaactacagaggcaagcttcaccaacagaaatgaagagatggctttcgtttagtttgttttattgcattggttaggatatccaggacaatttttcacgactgaaacagtgaaagcttgccttcaattcttttggagaaagcttcagcatttcatcattaaacgtttgctctaaggttggcttgtattctctctctctctctctctctctctctctctctctctctctctctccacacacaaacacacacacacatactcagcatatgtgctcatgtcatggagtaggtgtggagatcagaggacaagtttttaggaatcagttttctctttcctcttagctgggcagggtatctttccacctagcggaggcagggtctttctcctttgttcttttgtccctgtgctgtttactccgggctagctgtctcatgagcttccggccagttctcccatctctctcactgtatgagtgctgggcttataagtgactttttaagtgggggcattctggaaatcatgaactcaggtggtcaggcttgtgcagcaagcacttttacctgttgaggcatctccccggcctgtaatatgttcctagattatttttctgtggcaggatcttagaccaatctggaacttactatgtagatgaaactgtccttgaacttgtgatcctcctgctgcatcttctgctaccacatctgactctttcagggattaaaaaaaaagtttattttattttattttattttattttattttagtgtgtgtgtgtgtgtgtgtgtgtgtgcctgcctgcgtgtatgtttttgtactatgtgcatacatgagccttcatagatcagaagagcttgttggatccccctggaactggacttagaggtggttctgagctatcacatggacactggaaatggagccagggtcctctacaaaagcaacatgtgctcttaactgctaagacatcagtttagctcctcttttagagatccttattattagatgggggaagacttcttttatattctcatcttgtcaaacatttccaaatatcatgaatgggtatgaatttttcaaacatattttctgcatttaataaagccaatatttgaatgtttactaaggtttgttaaagtgatta

SEQ ID NO: 35740 - DNA, 1196 bp, Mus musculus
catgtatgtctgtgtgaggatgtcagaagccctagaactggagttagacatgtataagctgccaagtggttgctgggaattgaactcaggtccactggaagagcagccagtgctcttaaccactgagcatctctccggcctctgtgttttctttcttatcccttagttttattttgtgattatatatattactctttaatgacaacttcagcaagaaactcatgactaagttgacaggaatacataagtacactgtttctatcttcagacacatcagaagagggcatcagatctcattacgggtggttgtgagccaccatgtggttgctgggatttgaactcaggaccttcggaagagcagtcggtgctcttacccactgagccatctcgccagcccagatgagttttaatgtactagctcttctttattatttgacattcttcccattttagtggttgtgaaatctccttacaaatgaaattacattggtagtgaacgatggggttcaagtagaatgccatttacactcttggcaaaattaaatttgatccgtagagtctctaatatttactatatgaacaacttcagaacagccagccgactttcctagtagaccattggtatggagtctctgctagactggtctgtgttcaagaaaaaatagtcaaagcaaacattacctaaaccatagatagatacctaaaccatagatagatagatagatagatagatagatagatagatagatagatagatagatagacagacagacagatagacagaccttcttcatatttctctgttttcttaaaaacaaaaaaaaaacaaaaacaaaaaccaaatccagaaatgataagtgtctttttatgtcaggaagttgagctaatcaaagctagataaaattgcattgcttgcagtataactaaacataatcatttcttaaggatttgagttctgttttctggtggtatttttgaagtcactagcattctttttctaggatccttttctacatgaaaaggagatgggttataaatatgccaaagtagcggtggtggcgcacgcctttaatcccagcacttgggaggcagaggcaggcagatctctgaatttgcggccagcctggtctacagagcgagttccaagacagccagggctccacggagaaaccctgtctcaaacatttacaacaaca

SEQ ID NO: 35741 - DNA, 1113 bp, Mus musculus
caactccagctgaagagaattgagacaacgcaggagaaaagcatttgtaaagtgcaaagtgctgtaaaggacataaggtaacttctacctcatctctccttcctttcggtcaccacctgcatttcctgaggtggtccccattaatcctttgtctcaatatgctcttggagttcattagaaattgctgggtgaagtctacacgtggtgatgcatgtctttaatcccagcacctaggatacagaggcaggtggatcctcttgagttccgggctaaccagggctacacagggctacacagtgagaccctatctcaaagacagaaatgggaaaggggagagagagaataaatgatgagtagtatccctactggagattgaagattcacaatgtacactcactgttttgttttgaagcagcatcttgcatgggctagccttgattctttgcaccaacctctcagggtcctggaattgcaggcatgcaccaccatacctggttcttcttttaaaggctgtgagcaaagaatgaatacatctggtggacctaacctgaaccactaactgatttttataaaaagtgaagtgctaggctgcatatcatagctttttcctgcaatcctagcacttgggaaacaggagtgccctgcgacccatctcagaaaagggatcgtttgcctaggcgtagtgcgcttgccttcaattcctgcacttaggagggtaagacagaggatttctggttcaaggcagattcaaggaacgtagggctgggcaggatagcacaggcctgtaatcctaactgtttgggagagcaaggcaggaagtttgaaaggtccaaccagccagaacaattcagcaacaattctgcctccaactaaaaaaggttaaagttgaagatagaaaaaaagcggggggagtaagttctgttctaagcttttacaaaagtaagcaaatgtcgctgtcacctggtgggggcatgctttgggaagagccgctttctcgctccccccttcctgcagtctctctttgccacactgctgcttgtctccagattccgtactccgaagccctcagagtcctcctcctatttgacaacgcattgacataccacattctta

SEQ ID NO: 35742 - DNA, 1187 bp, Mus musculus
ataactttatttaagtatgaagtgaggctagcatagttgcacaagcctttaatcccagcacttgagaggcaggcaggcagatctctgtgagtgtgaggccagcctggtctacagaatgagttccaggacagcctgggctgttaaacagacaaatcctatctcagaaaaagtagcctctgccctttgtttgtttgtttattgagaacttggggtaatctttccacgtagagtttactatacagggaagtgaagccccgtcctggtcattagcagtaacctgggaaataggaccctgtttgttcgtattagaatgtatttcatggtacccagcactcagtagttgcttgacaaatacttgttaactaagaaacttccaagtttcatctctggcagcttgattctttttctgtccccttccttcagattctaccagccaggaggtattatctgaattgagggcattatctaagaaactcagtaaggaaaaccatctatctaagaaacaaaaaaagagtccagcaaaggctgttgacctggtctgggaagaggaacctgccccagaggaagatgagcctctcttgctgcagaggccagagagaatgcgaactctggaggaactagaagagctaggtaaagaggacagccttccaaataaggagcgccctagaccttcagtagaaggggagcaggtgaggaggaacccacagaatcactccaaggggaagaacaagaaggaacaaatgatcagtctacagaacctcctgactacaagaactccctctgtgacgtcactggcgcttccgacaacagtagaggagttggtgagcaagagccagatctttggcttgtggtggggtagttgacagttgaacagaacgggtccttcttacacacagcacagtcagtacatgttggttttgctggaatgtttttcaggagttaagaggtacagatgaccatggcaccatgctgggcccaagtgtagatatgtggacacagctgagccacacgtgctgcctaaatcctgagccactaaagttctttggggtgactctaaacctgccttcaaaggagaaggcagtcactgaatgctctggttggattccaggcacaacaattcaaagatcagtgattgatctgccaaagctcccttcactaaattccagcacccagtgctcagcactcca

SEQ ID NO: 35743 - DNA, 1233 bp, Mus musculus
ttccccatccagcagcactaacagccagcctgctcccgatggggtccctggacctttggcagatacctccctcaccactgcttctgccaaggtgcttccaacttcacagcttttgctgccagcccccagtgggagctcagtcccaccacacccttccaagatgccaggtggcaccgatcaacaaacagaagggacttctgtcaccttctctcctctcaagtcacctccacagctggagagagagatggcctctccacccgagtgcagtgagatgcctcttgacctctctgccaagtccaaccgccagaagcttccattgccgaaccagcgtaaaacacctcccatgcctgtgttgacccctgtgcacaccagcagcaaggccctcctttccacagtcctgtctaggtctcaacgcacaacccaggctgccggcagcaacgttacttcctgcctaggctccacctcttcaccttttgttatctttcctgagatggtgaggaatggagacccaagcacttgggtaaaaaactcaactgctctgatcagcaccattcctggcacatatgtgggagtggccaacccagtgcctgcatccctgctgttgaacaaggaccctaacctgggccttaaccgagatcctcgtcatctccccaagcaggagcccatctccatcattgatcaaggagagcctaagagcactagtgccacttgtggcaagaaaggcagccaggcgggtgctgaaggacagccaagcacagtgaaatcccgttataccccagcccgcattgcccctgggctgccagggtgccaaaccaaggaactgtctttatggaagcctacaggcctgacaaatatgtacccacggtgttccatcaatggaaagcccactagcacccaggttctacctgttggctggtcaccataccaccaagcatctctgctttctattggcatttctagtgccgggcaactaacccccagtcagggggtgcctatcaggcccaccagcattgtttctgagttttctggtgtgtcacctcttggttccagtgaaactgttcatggacttcctgaggggcagccacggcctgggggcccttttgctccagagcaggatgctgtcacaaagaacaaaaattgccgaattgcagccaagccttatgaagaacaagttaatcctgtcctcttgactctcagccctcagtcagggaccctggcactgtctgttcagcc

SEQ ID NO: 35744 - DNA, 1961 bp, Mus musculus
ggcaggtggcctccagtcagctgctgagccctgctgagaggcctgggagcttggaggacagatctcccccagggtcttctgagactgtggagctggtgcagtatgagccagagctgctgcggctcctagggtctgaggtggaataccagtcttggagcagttgacagaaacagcccctctccccgtcttctttctccttcgagttcacccttcccccaccgctcatgtgtcccccaccgagcaccagactgcagaaagaggcaataatacggaccaacaagaagccgccttatcaatgccagcattagtgactggattcctttcttttttgggggggggagggggttacagttagttctcatctccctgttgttgttgtggttggtgatggggtggaaagttgaactccacttctgaagacaagaggtctggagatggtgggaggtggcaccagggtcccttggactggcttctacacttctgaccaagaccaaacatgggcctgggtggctgtggcctgtcctaaggagaagtgagaaaaacccaaatctcttgagtgcccccttttgtctccctgtgctcttctgtcttccatagtatttattttattagtatttaatttgtattgtttcattggtttctgataagtctgtatcactgtgacgatttgagacaacttgttgtattgagggactttctttacctcctctcccttttctttctacgtgagctctggggatgctcgctccctccctccctccctccctccctccctccaagaaaagtattcccagcttgtctttctccatgtggggagggagcagggtgaggaaggatagggggacatcatcatatgattaaacaacctggctgctgctgacctagagctggggggctgggggcaaatccctggcctttggtgctcccccaccccctgccagttttaccccaccctttgtagcagctcttccatcttgagattggtgtttactagggagcagggttcctgagctgctccgataaaggcaggttgagatgggcctgaggcaagggtgctcctcacactgatctctcagtgcagtttgaacttgttccagcatctttggccctgcacccctcccctacttgcctcaccttacctaccctgggctcctcatctggaaatattgagcctttgccttgccaccactcccacagccttacagcatcctctacccctctctcctccacctgccccccaactctcctttggaatctgtaaagggcccggaactgactaggctccacatcaactcggggaatgagtgagtggctcctaggcctttggatgcctggttagatctggtaccagagggacggaggaggagcttgggttgtttccctggccccacccctccatggcattgtctccccccccccttcttatttttctaccgattgctatttttccgaacaatccttgtagagagtatgtaccatccaaaggcaggagggccttgctggggttggctctggatggagatggtacagttttattgtacaggtgctaaactacaacaaagaagaaaatagaaaaaaaaagacaaaaaaaaggaaaaaaaaagccagtttggggatgggacaatctgtcctctgggggctcctgacccatttaggagagttctttcttttaactgtgtgtgtgtgttttgttcccagaggaatttctgagtccccttctgtaggacagccccatcatcctacccaattggttttgaacaactgttttccctttttaacggcaacaaaattatatatatagatatacatatatatatatatatatataaagttgggggggtggatttcaattttgttttgttggaaattatgatactgtgtggtttgttttctggttttttggtttgcttttgttttgtttttcttttttgttttgcatttcggtgtgtattctggctgcc

SEQ ID NO: 35745 - DNA, 2409 bp, Mus musculus
gaagcattttcatgtggacttaagtaagagtacccacccttctatctcgtggggtgtgagaacatttgattccaagttccccaggcctatttgacatcgctctgaccaaagtgtgcccagttcaagcatctggcaccagaccagggccttcaagagcactagggagtagatgtgctcttggaatgaaaatgagctgacttggtgatggagggaaatccacaagccaggaagcagcttgtggccagatctggtcagcagcttcacaggacgagttaggcctggtcatacttcgttatctgtattccttacacagggaatttaccatccaatatgtgaatatcttcgtatgcatctgtgtgcacttgtgggtctgtatcttcatttctttgggaaggataggatgtagatgtcaggtcttgtctgtgtttgtgtgtgtgtccgtctgtccgtccgtccctccctaggtcagccacagagatgaggcagttttaagagaaagcactctgtaactttttcttgttgttgttggcaagcaacaatgcctttctgagactggaaggaactggtggaatgcccctcctcccagtctatagaggtgtcacagagctggaaaaggtctaggtaggagaacttcaatgggtgcatatgctgagaggacactgctaagggacaagaggccatgtatgttaaaaccatagtgggagagagaaggaacacacttagtcctgggagcacttgcttgtcatagtcaccttgccaccaggctggaacccggagtgctctactgaaggttgtgaggcaaagcacttatctctaggcagccctgattataaagtccctagccaggcctgagtgcattgaatggttgtggccagggcttttggctgtttgtataaaatcagccctatgcttgacaataacagccctttgtgatccagtactcttccttccctatcttgggttccctcttcactctgtctgcgctgagaaattccacctgtcctcagttgctgaggctagtggggtggcaaggctagctccagccatacagtctcactcactctcccaccctctcgctctcacagtggctctttgctttttatttctgcccatcacatctaacccgattctcgcttcactgagatgacaggagcgagcacacatgggttcctacagctcctgtcagcccatgagtctgcttttctcttttctgtttctggaaagagctctcctgatcttagtctctcagcagagggtctccatctcccttttttgaatctgcttgcctctttcctaccaggtttaggaacaatgtgtggagatgtcacacccagaaccaagtctagctagcctctggcgactttggttaatgtgaatcagtgctccaggaccttctctatgtcctctatgccaaaaacacccacttgacctaactacctccctggccggtcatcctcctccctactgttccctctccttccctggaggaaggagccatctgtggctctatgcaggtgtgtttgctacattcccagcaattggcgctgaaatgtctgttctaataaaattggctgatgatgtcaatctctggatggatggatggaaggaaggaaggaaggaaggaagcatctagagaaaaggtcaccattgttggcgttagtgtttgctgttcttgttgtgtttgggttttagttttttggggtttttgaacttgctctgttggttaagatgaccttgaacttccggttctcacccccccccttccttgttctcacatgtggatcaccatgtggttctgtggaccaaagccaggactctgtgcaggcgtgacgagtactcctagcaactgtgctaccttccaagctcaatcatttttttttcaatcagttttaatgagcacaaagggacagtatgagttgccatcagcctgggacctaatctctccatacaccattgtgctttctgttttcgtgcgggctcctcctctctgtgtgtgggtgttctccaagggtctccattttgtcatgggccagttctttcacatgagttctggaacctacttctctaagttcctggctctcgctcagccctagtgatctgcttctgttcatgatgccaccattctgctgaccttctagactggaaatctcagagctgtctggtgggctctgtgcacttgaccctgcccctctccctcatctcctgttatctggcctgtcttcatttccagagcctccagcctagcccatgcctcttaacgtcccacttcccaatgtgacttctcagcacttctctctggcaggctacttgctctggccttcctctgctaaaaagccttcagcgagtcctggcctgcagactaggccagtccttaaactgctgatccccacccactcaggattttctagc

SEQ ID NO: 35746 - DNA, 1190 bp, Mus musculus
gtccaccctggtgttcgtttgagagtgggtcttttgttaccctgaagcccacagtctaggccagctaactagcagatcccaccgatctgcccaacacactgccccagctctgggattctaagtatgcttcattgtgcctggcttttaaaaacaaaacaaaacaaaaacccatgttttctaggcactgaactcaagtgctcacgttttcatagaaagtactttaaagactgagctgtctccccaaacctggattttatagcccaggctaacctcgacaccacagtgatctgtccatcacaactctcaaatactggcattgcaggcttgaatcaccatgccgattgctgctcccccccccctttttgcatttatttcataaaccaaacacaaggcaaggtgtcgatgtcttatcaatgatccacagttatccctacggtcaaggaagccagtgtctgacttgggaggtcaggacaatgcatagaggtttcctaagcaaatagtaccagcagaacttttgaaaatgaaacactggcttaggaagagaaagcaagaagacaaagataccttgaacggaagggccccagtgaatgacctggggcaggagcagatgcagactcttggacctggtgggtttagatgaaagtgatcacctttcatatgactactatgagaatgttccccaagggcagacaccctggctggtgggagagcaggaactatggaatgcttgccttaagggcacttaggctaggggagccagatgcaagtggtcctgcaagattttgcaggccatgagggataaggtcacatgcagggttgggtgaggcaagatgaaaggatggagccagaataaggctgttagccctactgctcctcactccccagcccctgtagttccacaagtgatagacctaaccgcgttctctcttccatctaaagggaaattcaactctggtggataaaacagcctagcaacttctccaggctgtttgatggagtaggtggaaaggtgtgggggtggagactgggcggggctaaccctgtgggctaacggaaaggaagtgggagaggcttgggtgtctcctccagtggaggagagcggtcatcagagaggtcacttgtggcacccttcttttacccctctttaagtctcacccggagttcctcgtttatttcccagccaggataag

SEQ ID NO: 35747 - DNA, 1238 bp, Mus musculus
cctgcagtcccacaggtccctgttgaaggggaggactacggcaaaggtgtcatcttctacctcagggacaaagttgtggtggggattgtgctatggaacgtctttaaccgaatgccaattgcaaggaaggtaggtgtgcttgtcgatgcccttagaggaagatgaaagtgggggttgtgagcattcctgtgacctcactaggtgccctgagatgcattgtccaccaaggtcagattgtccttaggcaaaacaaggtcagattgttcttagtcaaaggcatagccttgcctcagaaacgcttctttttttacttgaaacttggctgggctgccagagggttgtcaagctgctcatttggggttagtagagagctgttcccacaatcccctcccagtgtataactggagactagcccagtttgtgggccaggcagccccattgtgtgggccaggacagggtgcacatggactgagttaagaacctattgttactctatctctcagatcattaaggacggtgagcaacatgaagatctcaatgaagtagctaaactcttcaacattcatgaagattgaatcccaatcgtggaatacacaagcacttttccatccctggcgggatgggtggatagaacattttttttattcagcatacattttctttatgtaggagcaggaatcgaacaagcctctgtgaatattttcatctgtataaatgcacatcacaaattaaaatctgattcttttcagtttggttgttttattttaaagggggtaggtggatgaaggggcatgtatacataccagcaagctaacagcagctactagcaagtgcatgattgttcacagccgtgcagtcagcaattgacactaagttactgtcagctctctaatcttggcccgccatacctctcagcccacagcatggatttgactttatgtatatgggtgttttgtctgatcatatatctgtacaacttatgcgtccagtgtttgtggaagctacaaatggctcccttggactggagttacatcctgttctgagccaccatatgggtgctaggaattgaccactggtcccctacaagagcaaccaatgcttttttttttttttttttttggtagacaggaagtatttaattgctacatgaattcatgtcgtttttgccctttttaaatttttttatttttattttttgtttgctttttttttctttttttcttttttcaagacagggt

SEQ ID NO: 35748 - DNA, 1208 bp, Mus musculus
atgttaagaacgcagcttttgtaagtaagaagtactccatgagcacgtagtgactgactgctgaccagtgaaaaacttctcttaggaaagatttctagacacctgctttccacgtagagaaaagagtattccgggctgaatatggtggtgaaggcttatcccaccgctagggagactgaaacaggagaatcattagtttaaaaccagcttgtgctatatagagaccctgtctccaaaataatgagaagatattcttcaatgctccattagtaagtaacctatgtgctataacaacaaaatagggagaaataggcatacaggaaggaaaggagatataggatagtttgttttctttaaaaatgcaatctcacttgtttacaaatgagtctagcttatagataaaaaatattaacattgcaagatcctttggagcccaaagtttatactctgcctttaacttgtttttggttttttgtgggtttttttgtgtttttgttaatacatggtttccatcatttgttttcgaaggcaggggatgctgcatgcttctatgatataaagttgggtcgaaggcgagtagagcatcatgatcatgctgttgtgagtggaagactggctggagaaaacatgactggagccgctaagccatactggcatcagtcaatgttctggtaaagttttgtgcctcggggacttaactgctgagaactctgtgtcaatgagctcaaaatacagagggttttttaatttggtttgtgatttggtttccttctagcccacttacctttgtacagaagggaaaaagtcccacttcatgtccacaccttctgtccctaaggggttattgaataaaagtaccatgtttgccaggcgtaaaatgagtagaaattgcaccagtgcttctaggaaactaagacgttgaacggtactagttgatacagaagtatagctttaagaataggcagcagtgtattttaattagtctttagtagtatccctaatggtcccagcatacttgggaaaacacagcccattcatgtaagctttaagagcagcaatttgccaggaataatgccatgtgcctttaatcttagcacttgggaaacagaggcaggcagagttagttctgtgagttcaaggccagcctgactaagctgttccaggctagctaggcctacctggtaagactatttcagttttttttttta

SEQ ID NO: 35749 - DNA, 1133 bp, Mus musculus
cagcagatctcagagaattcaaggccatcctagtgtacataggaatctctaagtcagtcacggctatatagttgcccatctcaaaaaagtcaatgttatcccagttacctcttggaacttaagaatttctgttttagaaaaaaagccacctctagttttcctaaaaacccagtgaatataattctaatttgtgtgagttctgtacttggaagcactggtgctctatgtaaattgtggagaaatatttaaaaatttagacaacccaaagatactaccctttctaatattgtgcacttattttgctaaatacatagctttttaccagaattctggtggctaaccaaatgttctcatcaattaaatattcatttgattataacattagatctgtggaaaaatacaggactgaaatgccttttccccactgcatggctgcggttgaaggcctctcctgtagaaaataccaggacttcctgcaatacccatccatctttttgcacacacttctttgtccatgtaccagcggatgacatcacctgctttaaaaatgagtggggggtagggaatacagtttccaaaagaaatgatggtaatgtcattgtaggaatgaatgttttatggctcatttgccagttgcctttaatctgatttcagtttcacataacagcatctgccctatgttttcacagaggtgggtaagagacaaggtctatgtaccactttgccctcttttatcccctcccccaatgctttgccaggttgttagcagtctttcttctttgcttttatttttcttgttttagtaaaccttgaagcctgcattagaacggcgtcatctacgtttctcaccattgtaaagctcatttccatcacacctggctttttgtcttgaaacctcaatacctgctgttcggctttatttggattttctgcctctttctagaaatgattaagggtaactcaatcacaactctgtgcctgcatctattactgggcagcagaaggggttgataataaatattttgtgttctataatattttatttattcaccaaacattatgctgcctattgtgatcaaactgatcacttaactccctgacctaaggttcaaatacttacatttttctttctt

SEQ ID NO: 35750 - DNA, 1151 bp, Mus musculus
tgccggctagctagttgcctaaaacgcacaaaaaaaaaaaaacaaaaaacaaaaaacaaaccagaaagtaaagttctcaggtcagttttggtgaccgttttgctagcagtccccattacctacacagcggctgccccacccgctgcctccgggcaggagtgtcccttgtccaggtttcttaagcggctcaacctactacagggccgctaactctgggaaacttgcaaatgcggaggcggggcccggggctttgcagcgcgcgtgccgccggacgcatgcgccgacctcctcgctgtgggaccaattgcagtgcggtgctgagtcttacgcctgcgcagtgggtctccagcctcagtgcctttccccctggctctagtgggccggttcctctatccaatgtccactcggggctgggaggaggagcctgcgtagtgtgcgtgtgacgggagggggagcggacccgagcccgtggtattcgacccgttcgacggtgcgtggaaggaaaaggaaggagcgggagcttccgaggagtgatcgccgaaatgttccggtgtggaggcctggcgggtgctttcaagcagaaactggtgcccttggtgcggacggtgtacgtccagaggccgaaacagaggaaccggcttccaggtgactagctgacctgtcccaggcaaccccttatcctacttcaaagtccaatggcctaggtgccatgggctccccatccctcgcagagctcccctgtccttcaaaaaaaaagaactttctttcacagtctcaagaatctccaaattggcgggatataaacccaagagtttccaagctgaggaataggcatacttatgccggcctgaccttcaagagatttgaaccccagaaatcagcatgaggccttcttctgggaggctttgcgatttggggataacagaacgcttggctataacagaccatattgcccatcctctgccaccttgccttttttaaagcattgaggtcagatggatgttgtcatttagtggttgggacacagtcacaagtttctcctggaactcagattatctgctttacctcccaaaactccacgtgagagctgtacatttgattgtcctacgacgtggcaatggtgtatcaccagtagaaactgtatgtcagat

SEQ ID NO: 35751 - DNA, 1182 bp, Mus musculus
cttgccaagttgtaatagagaatggtatgtacatgtgtccgttactttgaatttatgatctatgggccagtcgtttttctctatcacagtgtgagctcttgaaaattaaattgatactcagtcttcgtgtatgacatttgtaaacataaagccttctctgatttcagttaccgaaagagccgtaacttctgaatccgcttctgagtaagtctcattttcattcagcacaatgtgatagattttagcactgttgcaatttttcaatagatcaccgatagcaatgaagactactaaagtgtttctgttttttgttttaaagtggcttgttcaaatagattcctgctctatgaagcttgtgcaacctggtgcaagacaaggtggaatttcctaagttcaaagatctgcagtgttttcatgaaggcagttacaattcacaacactagctcgcattatccagctctttccagctttcagatgctgggagattcttattccatcttctctgtgtcaggttaacatgtgttagcatgtgctttgattctccagttgatgctggagaaggcaccttagttgctgtagtctattcttgttttgtttcagataatttgtatttttctttgttgtacttgccttctgaatattttgtgtcaaatggtatagctgctgttttgtctgttttgcctgcttcttaatttcttatcagtcttggtggtcggatagctgttttttccttcattctttgtatgtcattggtctatttgtcagatgcaaaggcaacacagatatttcaaaaaaaatgtccagtgtactccgggacagtgttcccattcaatgaagacaactgatgactagtctctctttccaaggaatatgatttatttcactgggagacctgcttcagtgtgtggccttaggattttatcagttcttaggcagagtcccttcctacctgactggccttccgtaaggctgatagtatctggccaccgatgcctgcaaggtgcaccaaatagatttgagcacaacttccctctgaggactttggttcttaagtgtaagcttatgagtttgtactaattatgaaagcccatcaagtgagtgaagcttacattcatgtttttggaaaaacaaactttgtgaagttatggctccaaagtaacagttatttatgttatcatttaa

SEQ ID NO: 35752 - DNA, 1179 bp, Mus musculus
attaaagtgaagagactatggaaatcagtataacttcacagaaggacactactaatgggtactaggggcagaaggaaaacatgataggctgtgttactgctcaaaattaagtgtgaattctgtgcgattgttaaaaatatgacataaattcccctagtcttagagttataaaaatacaatattacaaatgtcctaacatagaaagaagaacattgcaaacaaatgaattcattaacaagttgtcaaattattgttatgtattacaaatacaattatagccttattggctagccttcttcaagcatattatcctttctgctccagtcctgatgctgggtcctctatatattcaacacaattatatattctatatattcaacacaattagcaatgggatctcaaaaagaacagatggaggaaaagtaaaatttgcttctgaaatggcaaggattggtggaaagacccagcctacacggttaattaatgtatcggtggcctttttgagagaagtcataaatgatatttctattttttaaatataaattaggatctgtcagaaactcactaggcttctcatagacagcacagcttttaaaacgagctctagttagtccttgaactgactgttcaatatacactagcagtgagtataatggttgattttctgcatcatcttggttaggtcacagtgcccagatacttaggcaaacatcactctcaatatgtctgtgaaggaagttttgaatgagattaacgttgacactggtagaatttgagtgaagcacaatgccctctacaatgtggatgtacctcaacattcatttttaaaggctttcagagaaaagaaattcacttccccagaggaagacacaattctgtcttttagttacctttaatttgaggtagcacccaatcgaaactccctagggtttccagcctgctgctctgccctagtcgctagtcagtgaaggtgcaatgaaggcaaatgcagagctagatattgagagatgtgaaataagttatcatatacaaactaaattcataattcaaaatgtaggttaaggaccattgttccctacccagactgggcctaacaaccaacacccattggatggtgttagttctctacatcactattgctggtctttttcctgataatcacaaagtaggactccattt

SEQ ID NO: 35753 - DNA, 1211 bp, Mus musculus
gatggatcccagatatggcagtctctagacttggaggtattcttatggcttcaaactttcattaagaatttctgtcaattttagatcatgcagattttctcagaaattccactagtatctcataaaaaggcttctactacacatctacaatcccacatgaatgctggaagtccttgatatttacgaaaatttcctaagaaaagagaacatactacgtaaggcagacaagttgtagacgatcacagcaaaaagaagaaataaggatactgatgaatgttcagaggggatatactagagccataagttgatttgtgatcaaaaatcaaagccagaaaagttgttttgtttttgttatattagttgtttttcaggaggctagtattttttttccttgtctttggaggaaagaattcacaggttttttttttttgttgttgttgttattattgttttctgttttgatattagaatataatgacatcatttctcccttcccttttctctttgcaatccccgccccccttgtacaccatctctggctctctttccagttcataaagtcttgttcttgaattcttgttaattgttaaactcagcatattgttcagacttcattcagaggtttctgttcctcgggctcctctcatctctctgcccccacttctgcattgaaaccctagttgtatgtgtcacttgggactgggatccacagctctgcgttttaaggaagtaatgtctattatctgcacaggggcatttcatatatgtggggttttccctcaaattcatccatcatcagtatctgacatataaaccactgccctttgtatttataactatttctttctttgtgtctatctctgtctttgccgccaacccccattctcttctcctcccccattatatccagtgatttcttaaacaatgtctactttccattttcccagttctttcattttgcagttgaattgccttctgtttgacaaaggcctgcttttgttagaggactttagtgtgggtgctattctcctggaagatttgttaagtaatgctggaatggacatgcacttgtaggcaattctgaaactgatatccatttccaaatgtagaattcagaatagaatgcttacttcctcatcagtgccattttccagtgtgtgtaaggcctataagaacatgagctttcccttgactgtgctttagtgttcggg

SEQ ID NO: 35754 - DNA, 1155 bp, Mus musculus
ataataattgtgatcctcccagagtacactgttttggcagctggagcttcaaatcggatattggtgtaccatttggagatgggaaagatcacttcacttctcaatccatttcctcttcagaaaaatgagagtgataatatctgcccttatctatcttagtcagaatttgtaaaactaaatgaaacatggggtgaaagaagtttgagcataaattcatgactgtgggattattcctctggacttaattatactgccatctatgttcttaaaagcccctctcttcccattaacacatgtataactcattctgctatcatcataaagtttaaagagacatgcataccttaaagttacctagtatacgacattttaaaaatgggtacattgcattgtatataatttgatttaatgtacttatatctgaccatttatgcatcaagccatgaggtcaataattatttatcaagtttctaccatatgccaggtatggttcaatgctcaggaaaatatacagtaatcaagattaaacagattcttttttcacagtttatgattgaggaaggaaaaataataaaactattgaagaacctgtaagtatggttgtcaaaggtagaatacctagaagggacacaggactggaaatgaaggaaaagtagaacggtagaattgatgttcatgccaaggcttagagaatgagtcattgtaaccaaacaaagagatggaagaaaggacatccaggggggacaatataactgtgtgatatattggtgtgtgggtctgatcacttttagaaaccagcccactcaaagatagctgtggctctggctaaattagaaagaagttcctagctttcaaaccatgtgcactgttcactctttgtgtagattcactgaatgaatgaatgaaacacttctccaataggaatttctcacattcattaactgatttgtctagttctgaaaaatcaagctctcaatcttatggctttcttgcgataattctgaaaagtgtttgtcttatcaaaactacagataatttcacattttcatttaaaaaatttctatgcctttaccatgtttctgcattttacttcagttaattaatctattaatgaagaattgtgtccatgaatacacaaggtgatttttctatata

SEQ ID NO: 35755 - DNA, 1128 bp, Mus musculus
gtaatcatattttgaggttttcctacttgctcctggagtttcaacatgttaagacccccctaagagccaaggaatgcacaacacaattattttaaataatttttgtttgcttgcagaaatatcaagggaaggaacagtatatatgtatgtatgcacatatatgagagcagagttttatgaagatattgtacctggtcctagaggatttctttttcatatcatctttgacagtacagatttttttttttggtaacaaatatatttcatgaaattggaccatgctaattcatattctcaactatcctcaattttttgctttgattgagaagttatcaggaagaaatgtgtgcacagtaaacattgcataaagactctagggttaagggttgcaagaattataaatggagctggagcctcacctaagagtctgaggaagactaattagagatgcacaaaaccagaagccagagaccagtgccttagggattttcaccaaatttatgacatcaggatctgagagacatggagtatcattgtaatgaaagttttcttcattagtgctaataacaactacaggggataagggaagtgaagctgactgaaagaggtcattaaggtttggtatggggatggaaaaaatttcataaacagaaaaaaaaaatattccctcacattgagcccatgagaagctagatagtacagttttttaaaaaaggagttcttaatcaagtacactagcattatgttgcatgattattgcagtttttaataactcaattaagcaatttccattttaaaatgtaagctttgtggcagccagccttattatggttgattcctagtagattccatcatttaagagccatatgtgtggtatatagatagatgggcctagtacacttctgctgaacctatgaatgatctatggagataatcactttggggtttctttcttctaaatgagatgacttcatttactgcactgcctctgtgttccttggctgaggagacaaagataaagaccctaggtctgccgaatagaccaagcaacaacagaggtctgggctcagggcacgtggaatttggagtactttagaggaagttttatttctttcagtttacttggca

SEQ ID NO: 35756 - DNA, 1151 bp, Mus musculus
gtcctttcagcaaaatcttgctagtgtatgcaatggtgtcagcgtttggaagctgattatgggatggatcctggatatggcagtctttagatggtccatcctttcgtcacagtgctaggcatttctgctaaggccacccacattgagtcctggtgtctggaactcagggttttatcgtgggtattttgtactttttggctaatatacacttatcagtgaatacataccatacatgtacttttgggtctgggttacatcactcaagatgatattttctagttccatctatttgcctgaaaaattcatgatgcccttgtgatagactatggtagtttgttcacttttcatttggagaagtgtctcattatttgaattatctacagctagcatattcattggccggctgataaacatttttattgtttccatttttcttgtattatgaattagtctatgatctggtgatcccttaatgctatgcattgtaccctaaacaactctttgtatcatatcacaatttttcatatagtacgtttttattttaacttagactatagtgcctttttcatatactgtgagctttcttctttgacccaagaaccattcatagtttctggatgtttctgttggtgtctaaacaattccattgtgctaaaatatatgtgttctgttgtttgaatttattaaattttatgctatgacgtgaatagaacctgtcatgaacgggctatgatattttaggaactataactttagttccctatggaactgagatctttagatagtagagccaaaatgtcttgggaactgggaaatattgtttaagacacttggagaatagttaaccaagttgctctcattttcacccctaatagttatttacatacccatgaattatggtgttgaataagtatcaaccatatattagatattaactaggagacctggaagacactactagaatacattgcctattaatcggtgctatagcttagtcttcaaaaagacatcttattgttacatcaagtctacctcttcaggatggttggaaacatgaacttactgcatagtctgtaacacgagttccttgaattaatccatgccatgatgataaataatgtaatgtatcccatacatactttgtaataaaa

SEQ ID NO: 35757 - DNA, 1176 bp, Mus musculus
ttattataataaagatatgaattttattatgagggtcttatccctgtgacctcatccaaccttaattaatccccagaggcacctttctaaaacttccttagccaccaatattggtagttaaggcttcaacttgtgagttttgtagtaactcagatgtcaatccatatcattttacttaaaactcccacaaattcatacctttctcatttgtaaattacactttatgaaaaaaccaaaaaacctcttggctcattctaagacaaactgtaaaattttgtttcaataagattgatatttggatgtaatttatcctgaggctcttcagtatgaatccatggaaccaaggagttatggtgaatcctttttgaacactcctattcttttttgttttgttttgttttttgttttttaaattattttttattattttattaaatattttctttatatacatttcaaatttcaagtgctatccctaaagttccctataccctccccctgccctgctcccctacccaccaactcccacttcttggccttggcattcccctgtactggggcatataaagtttgcaagactaaggggcctctcttcccagtgatggccgactaggccatcttctgatacatatgcagctagagacatgagctctgggggttctggttagttcatattgttgttccacctagagggtttcagaccccttcagctccttgggtgctttctctagcttctccattggggaccctgtgttccatcttatagatgactgtgagcatccacttctgtatttggcaggcacttcgtatgagacagctataacagggtcccttcagcaaaatatggcatatgaaatagggtctgggtttggtggctgattatgtgatagattccctgggtggggtagtctctggatattctatcctttcttcttagctcctaactttgtctctgtaactcctttcatgggtattttgttccctattctaaggaagaaagaagtattcactcattggtcttccctcttcttgattttcttgtgttttgcaaattgtatcttgggtgttctatgtttttgggctaatatccacttaccagtgactgcatatcgagtgacttcttttgtgatttggaacactcctactcttaagggagaaaaagaaatgatgatctgt

SEQ ID NO: 35758 - DNA, 1099 bp, Mus musculus
gtttgctttttaaaagatttttaaaaattacttattggggttggagaaatggcttttcgttaagagcactgactgctcttccagaggtcctgagttcagttcccagcaaccacatggtggcttacaaccatctgtaatgggatctagtgtgcctgaagacagctacagtatactcatatacataaaatgaatctttttttaaaaaaacagttacttattttgtacttgttattgtttttatcattttctaatcatatgtatatatctgtgcaagcttaagtacctaccaacccctcttggatgataggaaccatctctggcctcaagagcagtgcataaagcttactcattcctccaaccccaagcacggtctcataacaattattccctctgtagtctcttagcaagctcatccatgaccactgaatttccattggaaatgactgatttactatgactgaagaagctatgaggaactccaaactcccaaagcatagtaattccatcggaaagcttacaaatgtcttccaggggactaagtagtagacaaaggctccccaagagcacgaatttatctccaggaggagctctgtggccttttcatacttgaggatttcaggttgtggtcctaagtagtattatctttgacagaggctaatttaggctacttcttcagggtctagaaggttctaaaccttttaagctcttgtaaccctttaattcagttcatcatgtggtaagccccaaccattaaattcttttccttgctccttcataagggcaattttgctattataaatcataacctaaatattttttggtgttttgctgtctgttacctttctctatatggtacctatactcatacaaaaccaaaggcataggtatgttacatcattctctggaccatatggaatatatataaaaaaatcctttgtgtttcctatgagatttgcctgggagtttacaaggcctcattgttagcaatatacatacagtaatcttaatttattatattatgctattcatatagctcagattcaactatttaataagatgttagttactatgatagtaaggcaggaaataaaggaactta

SEQ ID NO: 35759 - DNA, 1338 bp, Mus musculus
atgaggctattgaataccataggctattgaatacctgtaggtgcttgtgtatcccggcagtgtgcctgccaaggtccaaggacaatctagaggtggtgtttatgtccttcaaagagggtgctggagatggagcagaggtacccaggcgtacatgtaatcccagtaccacaaagggtggttgtcaaccagaggacactgcataaattcatacgtaaagaaatgagtaaaaagcacttggatttgtgattcacgggcttgctttctacttttctcttcacctactgggcaaatatcactgagaacatcaagcctgagcacacaggcttcagagggaatttatctagacaaaagagaggcatcctgatggtgaaggatagtggtttgaggtctttgctttgaattgcgaatataaaagtaaaatggcctcctagtaaaactaattgcctgagtctgcagaggagagaaggcaggcatttttcttgtctttttttttttttttccagaccaaatgggcaggggaataggttgtaagaaggcagtgtagagcttgtctagagctctactgcccccaagaggaattagtttccacaggacaccagcagtttctttcccataggcccttgctaggaggagggctggactttgacctgaagctcattgtcttcccaggcaccaggagatgtcaggaagctggtataaatcctcatgggacttgaagggcgagtggcctgaagtgggtcacaagtgatcagggattctcaaactgctgttcccagcttgcatttaaaaatgggaaataactcaaaagacaattgcaaactctctgcagtcaagatggctcctgcttgtaatctcagtgttcagaaggtaggaaaggactactgtgagcaccaggtcagcctggactagagagaagactttgtgtcaaagaacgaagttttataaagggcagtcttgtggggtagaggcatggcagtatacgaagcacgtgtgcgtgtttctgtgtgtttcttgctcttgtccatgctagaagcagaacttcattgtaccgtcactgctcccacagtactatacctgctggatccagaactgcggcagggtaagaccagccaggacaagccagtgccaggtggcacaggtgtttggaaaaggcctgacgtgtacccaactgtgtgaaggaatgggggacccaaaacacagggcaaagaattatgcttccatccacgagagcaaaggtgtgggggggggggctgggggggatagattccatatgaacattttgaagatgtgtaattggaacaaaattgaatttcatataagacatagtagcaagctcca

SEQ ID NO: 35760 - DNA, 1575 bp, Mus musculus
ctctcctactgtgggcagactggcatcacccgacccttcagagtattaatgcagaccttcgtgacagaggtccagtaccaagtgcgcagctgtgctgaggtccagggacagaaagcagatgggcagattcaacccccctcagctggccatgctaatctactagctggtgtcctagggcagcagggtgcctccctctccaggttctgatgagaaaacactgcagtcccagtttctttcggggcttgaagagaagtcaaggaagccctgcaaggcactcacagctgatcatgctgtctgtaattggctgccatcttctgccattgctaggaatcatgggaaggaggacatgtggtgctgtgacttctgaaactattttcctcatgatggcagttgtgctccacaaaagatcttttgattgtttcccccccctccccgcttcctgtgtgaaaaattatcaaggagaatataggtaccaaggaagattggttcggtgaactttgcctgtcctcgaatcggttcagggatggtttgttttgttttttgtttttgtttttttgttttcttgttttccttctgaagtcattctgagtcctcattctaccctaggttgtaggccatttccttttctacagctgttcatactcaccctttttagctacttaattttgctcttgattgtctagtcttattcattggttacaattttcacacaggaaaggtagtctaggagcttcgaaaggaaagcttttttcatgcagggtgattggtattgctgagggctaacaacccttgcctaccgtatcctagagcctgggtttgctccccaggactgaaatgggcactgtttgtcatacataattatgcagcagggaaattctcagtggtaatattgtaaaaccaaccaaacaaaaaaacccccaaaaccagtcatggcagtaagctgtgatcaggatggaattgtagaaaagcattcatgggcttctctccttccttttagtgttgccccctcctctctgtcactaaaccccactccatgttcctagtgtccctcttttctcctctccttctatgtacacccaaaggcagaaatacagttctacattggctagcctatatgtcctttaaaagtgttctctctcatgaacaatctctgctttatttcatttccaattaaatgcacacatataccaagctgttaatggtgcttgctttgggtaatgatatttacaataaagttttcatttgttcatccttgatgtgaagattggaaaggtaattgaagaagctgagctttgtggttttcgtgatccatccctgtaaccccagcactcagtgtaggatcacggtagccccgaggcctcgaacaacctggccagcctacacattggcctctgatggttttttattttattcattcgcagaaaggctcatggcgtctatgtcgtaaatgagctgtggatttgctatgccccttctcttcagcaacccttatttttcttgcctgtacatctctactgtgggaatcacagggaagctgctgcagcacaacttgaaatagaaagctggatggtatga

SEQ ID NO: 35761 - DNA, 1155 bp, Mus musculus
ccagatgggcgccatgcaggacttgaccatggcctgcacacacttcttcccaggagaaggggaatgaggaaagtggggggcctcaaagcttcctttcctttctgtttgtcttgctatgtttttatattcctttttatccatttaattatttagtacaaaatcaggtccagtctccttagatatggcattgatataaagtgtaaaatggaagctaaattctaggagtacagcattgcatgcttctgacagagacaaggaaggctagaatcacacagttagtggacactgcaactatattgacatttttttttttttagactgtgaaggtggggacagattgctgcactcagaacaccttccctgctctggggaaacaaacactgtcatcatggggaaaatgtttcctgtagacccacacaagcacacacccctcctcctacatccagcttctcctcagccattttgaagcagggaagatcagggggattcatgaatggcgaaatttggccttttttagtgtatttctctccttctgtaggcagactggcatcacctgacccttcagagtattaactcagaccctggtgactgaggtccagtaccaagtgctcagctgggctgcggtgcagggacaggaagcagaagggcagattcaacccccctcagctggccatgctaatctactagctggtgtcctagggcagcaaggcgcctccctctccaggatctgatgagaaaacactgcagttccagtttctttcggggcttgaagagaagtcaaggaagccctgcaaggcactcacagctgatcatgctttctgtaatcgccctccatcttccttcattgctaggaatcattggaaggacaacagcggagctgtgagttttgaaaccgcgtcctcatgggggcagtagaggtccacacaagagcttgtgagtgcttctcccctgcccttcccttctgaaaaaacgccaaagatggctgtcctaacttttatgcagctttgagtattttaaatggtattttttttttgtcatctactccatgtgaagccattctgaggccctagatggttggaccctttttcttcagttatgtaggttatctcctttttctgtctttataattgtgaatttttaccctttccagatagt

SEQ ID NO: 35762 - DNA, 1162 bp, Mus musculus
ctgatttcctactggaaactgttaagcggcctccagttagatgcttcctagtggctcttcacaggaatagaagagtaataagatattgttacctatccaattggaatttataggcagtgcaatctatttgtcccccttggattatgagcattcagaattagtacttatcttctccttatatgatggtagtcaaccgcccactgcacacacaaagcctgttattgtctgtcaggatatggtgcatggtgcccaaggaatgtggctgagaaccagggttctggtgcctagatttgctctaatgcagacactgaggttccatatagcattttccttcttctttctagaactagatcctaagagcagaagacaatcatatgtcctgagaacccattggaggttgaacagcgctgggtggatggagaaaggcagaaatgcagaatttcgtcattgcctggatgctgactttatccaaagagaagatgcatgaggagtgtacatgcctcaggtctcacttggctttctctttccttcttgctttgttctggttttggtcttttgtcctttggagttccaagtcaggaggagttgtagttggtctggcatacatgtaaaatgaaagcagaagggggcctgcaggaaaggcttcctcaactcacttggaaggaggaaggcaaggctgccaccaccattactggactccaattgtagttgcttttttttttttaatcggaaaggcgggagcaggctgctgtgagctggtttttgtttcttctgtagagcaacactgccatcgtgcggaacatattgcatacatacctgaatgcaggtctctttctctatggtggactaacaaataggaaggaaggctatggtctgagaggtattagatttactcatttattttatgtatgtcatcacactgtagctgtcttcagacacaatcagaacacacccgatccccattacagatggttgtgagccaccatggaattgaattcaggacctggaagaacagtcaagtgctcttagccactgaaccactgagcttggtctgagaggtattagttatccatgtttggactctttccccttcttcttttccctggtgcacagagcactatcttaatgcttctagacattatgaagaaggtggagtgtccag

SEQ ID NO: 35763 - DNA, 1140 bp, Mus musculus
ctcctggcctatctaggctctgtctgagattagaagtttgttctatcatgcctcgcccaaatagcctatgcactgcttactctcctaggcaggaggaagtgctttgtggtttcgcattggcctgaggcatcagagaaggaggattgcagcaggcattcccacacctcagtcacttatactgctctactgagcacttaacagtgtctatccgaagtcactctgggttctgtcattttctcccatgagaattcagtacattccaatgtcatgagttatgttccatcacttactgtgatgtttattgggggaatggtgcataggagacattgtttcctaatctttggtagatagagtaccttgttgttgagaaggagtttctctgtggagccctggctgtcctagaactcactctgtagaccaggctggtctcgaattcagaaatcctcctgcctctgcctcccaagtgctgggattaaaggtgtgcaaaaccagtacctggctggtgctgtatcttgtatgatgtctcattactaagttaagaatgacactttcacagcactccgaaagacagcatgctggctgtaaagtagtgccaacatttgtttcaaagcaagtgataatcttgttgagtatgtatgtgcacatcatttcacatatacatgcatgcatatatattttatactaaaattggatgggataggtacattatagtttggatcagatcagtttatatttcacaaagacttgaggaaaatgagattacaggaatgttgtcaattttgcttatcaccatgatgttataaaagcaatgttttaaaaacgctctaaaattactttagaactatagatcgagtgaggtgcttttgtctgagctaggatctctagtactagctggcctgggaatttgcagtgatcttccttcttgggataattatcgatgtgggcaaccagagcaggcctgtgagatattttgtttatttaaccaacctgtggcttaattgctggtattgcataattcctttgtaggaaagactgacacaaagtacgcgttaatactgatgtgagaacaggtgttcagatccagtggactctgactacatgaacgggttaatcactgttggaactatatacgatgttgag

SEQ ID NO: 35764 - DNA, 1192 bp, Mus musculus
tgtattgcctaaaatgatgagagctcttttggcatcttaaggtcttggccaaatggctgccaacaattcagcctataaagtctttttcagaatatggtgagttacttgggtgatgagaagatgaaccaaaaaaggactttacctagagaggtattcctgagctcaagttaccatatcttcccttcctcccctcccctctcctcccttcctctccccctccttcctgtcccttttctttcctttcctcttctgttttcttttcttcccttttcctccctccctccctccctccctccctccctccctttcctcctcctttttcagttttaatttttcttaggcttagatcctttatttgtcttggagctaacaacttgatgacttgggagcctacgaggggtgtgtggagctcagtgaacgagagagcagagctcggagggcaagggcctttgttgtattgttttgcttgtttcttccatagaaaatcttaggttaaggctggtctcctgcatcagctgagactgttagggactctcaacagagctctgcctggactgggactcactctgtagaccaggctggcctggaactcacaaagacctgccttcctctgcctcctgcgatcaaaggagtacccaatctaaaatttagaatattttaatatttttttaaaaatcttttcaaatctttttttttttttttttttttttttcttaatgcttgatgggcacaatgattttctgcctctggttttaggtttagaaaaacagacaagaagttttgttttttaaatgatcctgttagttgtgcttgctggtacctttttctttcttttttgcgagtgcgatgggcgggagaagaaaggcgcgcagcctgaactgtctgtctagatggagcactactgccatcgtgaggatgtaagttcaaatcccagcgcgcagttattagcgaattctcgagagcacttctggtttttccaactccattccgtaaagaagactacccggccctaacatcaaaatggcccaccgtttcccttctaagttagtctaggcgttctgagctgaagtttgatgctgacaggaaaacatttcatccagtgttgaaggcaggagctgcccgccactttccggaagctgggaggcgggactttggctgcggaagccttgagcctagagtcagctagctgcct

SEQ ID NO: 35765 - DNA, 1791 bp, Mus musculus
tctttcaaagtcatcctaactattaaatgtttgtaaatcatcaagcttcaaaaagcattctttttcccccacacaagtatattctaaaaatgactatttgtaatgaggtggaagtaagtaataccttcttaaaacaagtgtttttaagaagctcttgaaaaaaaagaaaaccacctagacctagaaagtattgactttcctagcaagttgttctgaattcaggcagccccatgtctagcaccttggagaaccttgtgtttgaagcacttccatgcaacatgtaacagcagaagtacctcttggtgtatttatcttctctttcagatggaagaagcaattaacccttatttaacatttaaagtaatctcatttagccgagaatggtggagttggtctggcttcagtctttaaatcttcagctcaaatcacatattacatgcttggatttagaaaacttttaacaacctttttgtcttgtgattaaatacctgatcaataggtatgagcgtaactttaaaccagcatttattttgtcgtggcaatgcatttttgtagaaactatttatacatttttgtttataattatccactcataagtatagtgtgttcaattctgaaggggtatttaaatgaacattgtccaactcataggaagataccatagagcaggatcatttcttgtcatataaaagtaagatagactgtgcagttaattttcagttctatttatggtactgttaagtgagttatagccttttttagccatatatatatatatatatatatatatactatgtttgcctaagtgctaaactaggtctaatgtagaattgttggtactgattaattttgacagttatgattttaatgtttgcatcttcacatttgagcttagcacgaaacattttaaaatatctgtgtaactgccaaatgtgaaaaggaaagacattgtacaagtagccaatgcagtttttaattgaaatgtcaattacatcccttcttttaaaaaagaaatacaaacatttgaaaggcagaacattgtatgccaagaaaattcttttcattggtgcctatcctgtacctgttgctttgagttgactgtaccttgaattgatgacttggttagatttttagtttttttgtccatgctgtaaatgacactcaatcgcagtttgttctccatagtgctctaaaaataattgtgtgacttgaataatgggtgacattcatatttttgtgaaagtaaaaacaagttcataaattgattatggaaaactgtaccacacgcctgcatcccaaatacagctggtattgcttactcattatagcgttagttctgtagacctgtttctatgtgaagcatatgtcactgtttgggggattttaaaaataaatatttaaattttatgatcctcgatgtttgttttcttgagggtgggtctgatatgttattctaattaatttataatagttcttttttattattggaacataaccaaggcttccattgaaactaaaagttactaagaattgactgtatttatatagctgaagatatatatcctgatttcttcctcctaccataaaactcttaatagtacttttaaaagtgtcttcagatggctaatttaacgatccccttaattactattttaataaaagatcatatacagatttaaactttatagttcttaaggaaaatatacatttagcaaaagttttcaaatgaaaataagatgagaaatagcatctaactcgcaagattttgagtttctcctggggaaaagatta

SEQ ID NO: 35766 - DNA, 2876 bp, Mus musculus
ttgcagattacaaactcagaggaaatttgcacagatgctgctttggagaactttacaacctgggttgcagaactgagccttggtaaacctgtctctatcacagcatgttgccatacatctaatgaagtgcataaggtctttggccctcaagatccacggaccttcacagtaatgcttagcacgtttaccatacatttaaatctgttctttatcaatccgtccttttatagctttttaagttcttattgatggctaatatgaaagggttaattttaatgttagttgatttcgttaatcagtttctcaacttgtatttattactcaaactcagtattacctactcaatgccttttaaaagaaagatataatggagaaaaaaaattgagccttaaacaaatggttacttctgtatattacctcgtaccaatgcttcatcctatttgtaaaatctttctcctttaaatggttggttaatactttgagactttgtttacgtgtggcagtgttgtaaaaagaaactaaagatcacattttacctgtatcgatggactatcccttttcttcaagtgcagttttggtaattaacgagttgtgaacgttacaggtgatattggaggttggctgtacaacatttacttgaagttgaagagttaagtatttgattccattaggccttcacatgtgttaatctcatttacagcattaaattgcagcagtaacatttttctttctgtgaagttctaaacttagttatgacctacttagcaatgcctttgaaaagggatattgtgtccatggtaaattaattgtatacctaaacagagatagctcagctttgcccatcaggcttgtcattgacatctggtagacttctgcacatgtaaaactgaattcagataaaaccatgtacaatttctagttcttaatatttgtctttctgactaatagtttaaagcaatatttgttaatgttttcttgcactatcacaactgctttttagttctttttcaagaagcatgttcgtagtagagacagatctgtgtaacaggagggaaagcagcgccgagcctctggctggctgtgttttatttttgcaaatgtgctttctaatagccattgccttccatgttgtttacctaatcagcacattttgtctgaatacttgaacattttaccaataacgcaggtatagaaaaagaaaaaatacttacaatgagtaatctttttgttcacttttaacatcatgatgacgaatccttttttctagcaattatttttcaattgtgaaagtttgacagtattttgtttggggttttatttggttttatttgtgtgcttttaatttgcagaagttagtaactgcagctcacctactgcaccaaagctctcgattttaggagcccagctttagtcatttgaacatgcttctaaataaaacaaaaccaaaactatgcttttgatctataataatagctcaataactttgtcaaaaaaagctctattatatgcagtgatggtttgtggaagggtgtggcaagtttaaatttgtattgtgtgtggtgttcaaataaagtgaaatctacattcatgtgacttattggtcagcatggccattaattaatgagtagaaactgattaaactttgatttcctttttttaaatcgtgttgcatttgattcctgatcagattccctcaaagcgagctcgtgttcttacatttgggatttgacggtgagaggcaactgaaatgtttgttccttatttacaaactgtgtgaaataaatacttaatttgagtttgcactttaaaacccaacgctccttcagagtagcttaagtgcttgtggctcatcattattagccctgtgaaattctaaaggaatcaaataattcatgatggcttcaattttctgcagattgatttttatacagttttttccccatggctatccttctgtccttcccttcttcgccttctgtcacctcgctctctatcacagcgttcattgtcattgacctcagcagcaaatttcactcggattcacttaggatcacaggaatcaggggaaagggatttgaaaggtggtttctccagcacattttaagaaaagggaccaaaagttattttagcttcctcaatagattgcatgttgcttattaggataagaaatgaatattaaatgcaatatatgtcttgtctttattatggcatctgtttaggagttgttcaaatcactgcagtagggctctgcaaataaagtcatgtaacctattatgatggatctaatgtactgtaactttatcagtgaacagtaaaatctcgaataacaagtacaaacattgaacaattacctatgaagatttgtaaaagtaaattttttccaatagatttcattcttgtcattttgtaagacgaccctgcagtccacctgtttgtaacttttttaataaaatagatatctgtattatggaggcttgtctctttaattatttcattattggcatattacatcttgttctagatttgctaacttaaatttttaagcaggaagtcattaaacacatgattatatattatagtacataaacagaaattaaagattcatttacttgattccttagttgctatttcgacattgtatgaggaatactaaaatatgccctaaattaaaatgcttagtcgattagactaactcagaaatgaatactaattagtttaaaatgcatatacttagtccatatgcagaaaatggccaaaatacaaatttgttgactggaaactatgtaataataaatttggacaatattaacatttaattaaatgttgatatatcaaattaagaaaattcaaaccagttatcatttggcttttggggt

SEQ ID NO: 35767 - DNA, 1189 bp, Mus musculus
taaatttgtcatttaagaagagcttagtttcagtttttgcaaaaaaccatgagaccgtaatgagtaggaactagaatgaaattgaatggattcgtacaactgctatttaaatacagtgtttacttttgaaattggagcatgaatccacacctagctattgcttttcatttgacttttctagataaattttcagttttcatctattcatgaaagcagtctgcttgctattccatcagtcttgctctgccgttcatctctgagcatcctaaaacactgtgatcttgccataagtgttgtcctatgccactcgactgtgtccactcatgggaccctcaactctcctgctctcaactctcagcaggaaccaaattaacttagtattttgtgcttgggttcactttaacagcataaggagtgagacagtgctgtttggaggacgaacagcagctacagtacattgtaggaagggaaagaggcagctgaggcgctcatgagctcctcggaatgccaggtgattctcttccttgtctttggtgagtgttggtaaggaggcccctagacaaaatgcagccaaggttgtcgaagatctggcggtctgtgggataggctgtggcatgcagaaggcttactaacaaagttctcgctccacctttaaaaaaaaaaaagaaagctcttctacatttcactgaaatggaaatgagtaaaattggggggaggggtgtctgattcggtttgattcatttgatggatttgattccaagttttgatttgtagatttaataagatagtggcctaattttaccggagtctgttagagatagtagaataaaatagcaaataagagagtttagcttttttttttgaaagtttagtagatagtctaatcaaactataaactgtaaatgtgattataaatacaggctctgagtaccaagttactaattggtgccatgttttcgtttttcttattgttagtttttaaagttttaattgtactacatttttatatctaagtatccaatgagtttaattttgaaggagagttggagaaggtttaaggttttaccacttctattcagaccatctctgtaggctctaaactgagaccatagcgtaattcagcatagatacagtccagaactaccctctacaatccacagttcaagaacaaatttagcgttgtacacaa

SEQ ID NO: 35768 - DNA, 1157 bp, Mus musculus
gacacgttgttcaatagcccttcagtatttcttactgactcttgttttgttttctatttcagttgaaatattgagcagcagagttacagagtatcagaatctctcaacaagaaactccgtgtggcctttctatatgtattctcgtatgtcttcttgtaccaacacgacaataagcatggtgcagtcaatatactaaagcgcatatacctgttgacaaattcaaattttaaaaatctgtggagatgttaaagcaaatagaaaattaaccagtatgtgttaccttatacggattcattgtatatgaattagcatacaatatacaaccatacaggtttgtcatgtatatgaattatcagatccatattacatgaattttccatatgatatgaattaccatattgaatataactgtaaaatgttgtgactgctttccagtaatggtttataataaatgaacttccacagtgtactgtaggcttactgtatactcttggtggataaattctgttttggaagtgttaccttactgttttgtttacaagatagtctataggattgatgtagaatgtaactgatatttcccacaccattttcctccattggtatattgtattaaattgggttctgcttagctctttcatgctatagtgttttcttgtttatacgtgatatttgatttcaattaaagcatcataagtggtgaacagaactatatgtgactgaaaaatgtgacaggttcatggtaatatgccctctttaaaacatttctgcaagtttccggaggcctcacttctgagtgtgcacaaaatctcttcatatatagaattttacctgtagatctgaccttgcatagtcaataatatactaaatttttaaaagagaaaaaaacttccctacatgtgataggaaagttcaaatgttaacctcaaaccattcctcttaaataatttgagaatcaagtgttcacattccaataaatttcttagcatgtataaaaattacggagagtagccattacatttattgtgttacaggaatcctatctctcagcttgagtgtctaaatttgagccatttgtcatcttcagctgagaaactggtactaactactttaaaggtatactaatcacaggctgaaaatcaagcagagagatgtgg

SEQ ID NO: 35769 - DNA, 1183 bp, Mus musculus
gtttggctggctatttctggcccatggttcttttcttgtattgacagatttgtacacaataataagagcaaaaaattttctcaaagacaacagtagactaatcattaagatagccagagttgctcaataacaccaaaagctgcctcttgataattgaggggaacacttctaccaggattttgtttgtgaaagatcaaaaataaagaatgttttgcagcgaagctaagtgtcagggacgtgcaagtagaggagaatagtttgatagtctgcatctgtgaagagtattttgatggtttcaattacaaatggaacaaaggaagaattatatacacactgtgttgtgaaatatcatactgcttggcagtttacacctcatggttgttgctacacttctataagagcttacattaatcccttggctttcaatcaaaacaaggtgaccagaagtggtattcatgctttcaagagggacatgcttagaaatatgatcataaagtcacatctgtcatagtctgcccaagtgcatgacctggtttcatctgtaataatatggccacaagtttggcaagaagttgagtatctggctctaaagagattttcttgactctgagctctgtgacaatatttgcagcttttgttttgtggtatttgcagtgttgagaatgatgatacctaaaaaaaaatcaaaaaacaaaaacaaaaaaatgaagaaaaaacaaaaacaaacaaaaaaaaactggaaggaatttttaaaagcacatcttgaagtcaaagtatttggtgtacattgtgttcttgaaaacttctgtagatcactatggtatttcagtaattttagttttaattgaaaatgattgttcttaaaactgacagtgttggaaagcaggacgaagtctgagccagtggaaaagctcattacagaaaaaaaaaagtgttattgctgtggtgtgcatggtttgcagagattaagtgcattttctctgtctctactgattattgtatatagagaatgttataaatatacatttttgtcatcatcatgtaaatcccacgatttcaaactgtaaacatctgttcagtggtgtagctttacaaactgttcactgattttgtgtaatttatcaatagatgtgaaataaagtttcaattgcaggctgtgagtaatctcatgatttcaaggttt

SEQ ID NO: 35770 - DNA, 1190 bp, Mus musculus
cctttaagtacacccacttttccatataattggctcaacactgctatttgcataattgtcatatttttctgcttcccaagaggtctgttaagcataaaggtgagccacaaagtggtttgacaaagtgcacatttatatgtgatgtgcaattctcaagtcatgaagaaaattatatcttttctattgaggctatcttacatatggaaaccaagtattcaaaactcattgcccccagagatgagtttaacctgctttgcctgaacttggccaaagactaatttcctgagcctcaggtcttcaaataatgaggttgcccaggggccttgatcttatcagggacatacaacacaaacattttctttaagctttgctataacaataagatcatttagtctgaatcttaatcttggatttcctcatagctggcgcatgttttgctgcaaggtgtcaatcatttagccactcaaagcttccctttgtctagttgttaaatggtgatacatttaactcccagagcaattacatagtcatttctaagcaggtccgttacccaggacatgctacatagtagatatgctgataaacatgtgcaactccatgatttcttcttcgtttatagtgagtggagggcattcagaaaacagatgattagtttccatcatcggcataggaaagacctggactctcatgccttcctcttacaagaatagtagtacaaagagctatgggatactgggtagatttttcaaaaagcattacaaccatttctcctttatctggtaatggaaatagatgcaaaaatatggacctttaagtttgtattgaagaggattaaataaggtgaatagaaaagatttaaatgctcagtgcttctgtaacctggaattactaatgacatccttaatgggtttggacatattacctggtttgaaaaatctgacagatgagggtgggaaaactgaagtccacttcatatttgctgcgttgtcttgtaagttttcaacactgggtcgggtggaatggcatcttctcttgtaagtgatctgacccaggaaggctttcacctacttcctttccaggggaactagattctcccaggtttcctgagggctgtgtgtgcttctggctgcagactaatggcatcagattgcagggctgagtgcaggaacagtattcatggtacgatagtg

SEQ ID NO: 35771 - DNA, 1897 bp, Mus musculus
ccttttcctcagaggtaaaggtactgggtatcctcagaccttgatcttaaggatgggaaagctgatttatgctcacggaactggcatgtctttctgcttgtcagctaacaagtatcatgttggcccttgatgatctgagcccacttcaccggtttgatcttctccaagagtcacttgagtaacattaaaggacttttatatactaggacttaatctgcaaaactgaatggtttcatgcactcaacattataagaagagttatggattgtttttcatctttgtagaatggcattctgtttctttaacgagtacacaatacctgcttttaatatggactagtaagacctaaaaaaatctaacttgagtaataagctttgatattatgtgaaagatgtctgtggggatgatctgccatgtggggaaagctatgtgcatcttaggcatgcttttctgtaaacactgagcaatcagacttagcactcgtaatgctaagcctgtgctttctggaatgtcttctcttgcctttgaagcaatgtgtctataatactgtatacctgcattggagtaaatgattgtgctaatatgttatcttacgtgcacacaggaatgggttttcaatcctatcttggccaatatgtgtttatctcctagtgtatggggtagttccagttccaatatagtggcataggtgtttcttttctttaccctttatttttctttttaagatggggtttttcttgccattgtaggccaaaactggccttgaaatctactccccaagtggtatgattaaaggtagaggccactatgtctggctttgatagcattatttctggtggccttttgaggagtgaattagaatttagtgctttcttgggaggcagaggcaggcggatttctgagttcgaggccagcctggtttacagagtgagttccaggacagccagggttacacagagaaaccctgtcttgaaaaacaaaaaacaaaaaataaaaaaaaacaaaaaaagaaagaaaaacaaacaaaaaaatttagtgcttttagcgaagtcagttaatgcccttttgtttctgtattttttataaatgagtgtactatgtatggccgaatatcaggagagagccttgaatctcattataggtgctctggagccatctcttcagctctaaataatgccctttaagaggaaaccaaatgtaaacacttgaggttctcttctttcgaggtagagtgtagaatgtagtagacaattgaaggaagacctgagattgctgaagcatgtggatgataagagtcttttcaattgaaatactcttatgtataaacctattatggacagaatgagggatttttctgtctctctaatactgagacaattaaggatgttgggagttttatgtagagagggaaactcccaacacttgggcttctaaattccagtcttcaggcatctttaattctgagcccatgtacataagtagactttagaacaggaaagacaggagagtagaagagaaagagttggatatgggggttgggggtgattattgaggcaatctcacaatgcagccttaggtggcctggaattcatagagatccatctgcttctgtctcccatgtcctgggattagacatgcatcctaacacctggccccaaaattgtaaggtacaaaaagttaacatcttttattttgagattgcaagaccattttgatggggagtttttatactggaaatgttctttagcatgtagcacttctaaatacagggcagctaaaggaggaagtttgggttgtatactgcctatgtgttgtttcaaataaaatattaaaaattataccattgactcaatagttgttatttattgtagattgattaatcacatttctaggtaat

SEQ ID NO: 35772 - DNA, 1534 bp, Mus musculus
acgtttgttccaaccctgaccacatcagtcttataattacagctcatgctaatgagtgttctcttatacaagtttggaactgtaacttttgtatagtattttgtcataaattttattattgacagtaaggtttttcagtattttggtggaagttatataatccaaagttgcctttataccgattaaaatgacttattttgcttccagtaaaaggtatgttttctctcatttctgctttctttcttgcatggcagcataataagttctaatgaaaaagcttttatatatcagaaggaaaaccacacatgcccagacacagcacagttcagacgagtctatccagcgctgttaccccagcctgctgctctcttgctctttctacatttggaatggttcggtgtcatcctcccctcctggctttctcacagtggatgccaattaatggtgatgcttaagtgaagagagaagagaacattttatggctgcacatgttggaaaaaatacaaaaatggggagagggctgcatttagcttttgttgatttttaggagttttcattaacactgaacaatgttcttactgttctctgatttaggccttggttttataaactgttttcaaaatagtttgattttgttaagtctgttttccagtgtctgtctttagttgtcttgtctttaatggggttattttcttattaggaaaaaaacaatttccacttctagaattaacgttgaaggagctctgcatgtgctcgggacctactgtgtgctcctttctccagaattctctgtttgggatggttgacaccgtacttgtattaactggacagaatagatcagttgagagccttctgataacactggaggatcctggtctacagatgtagccaatctggatgcttgaactttttcacctcttcagtggctttctgatatgtctcagtcataagtttgtagaaatcgagcttctctcccgtctggccttcagctctttgatagagcatcctgcggttccttatcacctggcctttcattccagctgccaaaccagatgctttgcctttgagtgttcctcctcagtggatatcctttcccaaatgacaactctggttaactgctcattgactgcagccctctcgttctaggttcctcacttgcttatggcatcaacagttttttgattacttctaggttccaatggcagcttctcagctgcttttcaactcatcatcaaaaatggaagcactgtacatgctacaataccattgagatcttgagacagtgagatttcttgttctggtcaaatatcttctggaagccagattcccttcaccacagaatctctttctggtcaatcttgaaggtgcttctacttctgttcccacagagtctgagaatggactcacaagtacatcagggaccaagtagaagcctggactctactcttgccaaataagagcaaagccatgaccacacccctaccgtctgtattctgatgcagtggttttaagagcggcctaatcagtaccatca

SEQ ID NO: 35773 - DNA, 2605 bp, Mus musculus
gggtttttcttttccaattatggtctcaccttgtttctcacaagaaaaccagggtcctttcttggcatgtaacatgtacgtatttctgaaatattaaatagctgtacagaagcaggtttatttatcatgttatcttattaaaagaaaaagcccaaacaagctggaaaatttccatttatccctgttattttagctgccttattgggagagaagtggagttgactttgggttttcttcctttctttctttctttctttctttctttctttctttctttctttctttctttctttctttctttctttctttctttctttccttccttccttccttccttccttccttcctttcctttcttccctttctttttgctttttttgtttctttcttccttccttccttccttccttccttcctttctctctctctctctctctctctctctctctctctctctctctctctttctttctttctttctttctttctttctttctttcatttatattaagttaggacagaatgtgaaggcacaagcagggttctgagccaattgccagactgtgttcaaacaccaggacaagaacagaatgagacttcattcatagttggagattggaagagactgcagatcaccccttttttttttattgagttgaatcacatgtaacttgatttcttgaacccacccaaacttaaagtggaccccatccagcaaagtaaagattcttgatgtagtctcccttgaaagaagaacggcactcaggacgtcccacttaacccatggacacgtaggcttggggatgtttattaaacaccagataagttaggaagtcacagtgtaccaattttttgttttagtgctgacactttctgttttttttttttttatcccgatggcagtagcaagtgaccagcgatctcatttgttcccctgtgttagagtgatgcagatttctgaccttctgaccactctgggcagagtgccataaaagggagctgtctgggctccgtgaatagctgttaacactcttttgagcagtttttgtctagtgtgtacatatttgcagggtttttttttgggggggggtatgtttgtttgttttatattccagtttttaaaatagtataaggctatctactttgatttttgtttttttttgcctgctccttttgatcagttaaatgaaggacttagagtggtctgcatccatttgctacatatcccaggcaaggagcccacagggaagagagctgagtgctgagctcctgcatcttatcttttgtgggagagatgagaataagtaaaactgggaagagcacatcttctcagtgactcttagccacatggatggagtggcgaagttgtcccaggccaaagactgtccactgccttgtccccttggaagccctttccttgtgtacaaataaccagtcagaaaatctggaaaacatagcagatcatttcaaaatgagttctcaggtcttcagaaagactacaatcatgcaagtctcttcctgctctaaaagtcatttagatcccagaattctactgaactgaaagcccacaaagaggcggtttcatgttactattcaatcttcagctgtaagaggaaatctctatttttatattgaaacacaattacttgatagctcagggtctacatttcactcaactttttacaccaaattctgaagaatggtcaaaataaaatattgggggctgttgtaaacagaggcttaattttattagaagtagccagttatttattaaagcacgatgttaataaaataggcatattctagctggtgtgtataagtgtttgttttttttttcttaaagcaaatcacagagaacataactccatttatataagagggaaactagattgtaaatagctgggctgccttgagagaacttggaaaatgtgctgatagttagaaagtacctcagttgtgaggaatttcctttttagcttagactgctattacttttacttggtagaaacgaatctggtctccaaaatatggctcaaagagttgtccctgtagaccttgttagattgtttttaatttaaaaccttgaactctgcccagctgttttctttcagtcaagtcctccaaactaataacattttccgaattaaatattcttgaaggtttctctggacgctcgctgatttgttttctttctttgcatttttttccctctgttgcccttttattatttaaattgtcttttgcttttgaacttgaactatgaaataaacaaatcatagatttttccattcaggtctgactggacaacttttggcttctcaccagctggcaggcttaccctcccccccccacacacacatactacccctcccctcaatagagaagaaaggcaagttgaatatttgaaagcctttagagtttagagcaggaggcagaagaaaagccttaggagtggggcctgacttccacaaagttagctgcatgtgaagggtctgagttttaccaagttatttatgaagtactttgctttcaaacacttcacatactctgcatttaagacaaacatcatagaagagattgccaggaggggaatgtaaggcaaaac

SEQ ID NO: 35774 - DNA, 1369 bp, Mus musculus
gttggctgtgagcatctgcctctatatttgtcaggctctgggagagcctctatctatgagatagaaccatatcagactccagtcagcatgcattttggcatccacaatagtgtctgggtttggtgactgtatatgggattgatccccaggtggggcagtctctggatgatctttcctttagtctctgctccacactttgcctccatatttcctcctatattttttctcccttctaagaagcactgaagcctccacacgttgatcttccttcttcttgggcttcatacggtctagagagatgactcattaaaggctaggctcacaaccaaaaatagaagaaagggcagtcttagaatcagtatttcagaagttgtaccaatgttgtagcctgacattgaagaaagtagtggttgtagcaggccatgcacagggtcttgagttccagctgcactagaaatagcaaatgaatgaagaaaaacaaacctcatgtgatactcaccccaacattaactctagctttccagcatctgtcttcttctacttgtctgatctgactcttagttgatttccattggaggcaagcttcctaattgggaacagcatctgctcatccatccttaagttcatggttgatgctccagtgtcagttgtgtctatttaaattcaaacatgattttcttgtttttttccctgtcacccattaggtgaaccccacagctcagtgcacccatgcactgctgaagatgatctactgctcccactgccggggcctggtgactgtgaagccctgttacaactattgctcaaacatcatgcgaggctgtttggccaaccaaggagaccttgattttgagtggaacaatttcataggtaagcaagtgattgatgttctgtgttttactagagatgactccacttctggccacaaggactgttgtcattgccaggtatgaaattttcaattcatgttagtgttagacgttctccagactcttggctctgctacactaagtactttgaggttagtaaaatcagtacttcaagtcagtgtcctctttcagaagacagttagatacaccaacttttaatgttgcagaggtacctttttgatattttctgagaaactcaggtttagtcctcatcctaggtctttctttcttcatgttccctctgatgtacagtcttcacagagccaggaaagtagctttgaagagtctctcttgggctgggcaggtggctcagtgggcaaagcgcttgttttgcaagaataagggtctatgtttgatcccaagaaccagaaacaaagctaggtatggtggtatatgtgtaatcccaggatttggttggtagagacagtcagcccagcctt

SEQ ID NO: 35775 - DNA, 1196 bp, Mus musculus
gaggtagccatctatgaaagtgtaacttcgtgatagagatttcttttcattgacaaatgatttgagatggaaattcctcagaagtacactttatatgcaaatgtgctttccagtttaatctcacaattgtttttcattttttttctaatttatctcattcagttatttaattactagaaaactgcctttctcatttttcctctccttttttgggggttttctttttagaattcttcaaagaacttcttgaaaatgcagagaaatccctgaatgatatgttcgtgaagacatatggccacttatacatgcaaaattcagagctatttaaagatctcttcgttgagttgaagcgctactatgtggcgggaaatgtgaacctggaagaaatgttaaatgacttctgggctcgccttctggagcgcatgtttcgcctggtgaactcccagtaccattttacagatgagtacttggaatgtgtgagcaaatatacagagcagctgaagccttttggagatgtccctcggaaactgaagctccaggttacccgcgcatttgttgcagccaggaccttcgctcaaggcttagcagttgcaagggatgtagtaagcaaagtgtccgtggtaagttctctgcacgtactctgtgtgttgacattttgactggtttgctttcaaaagaaaggttgaagaatggtgcaaaaccaaatcattagtgttccattggctcaataacgatcttttcttggtctctcacctcccacacgttgtccgcaggcatgtgttgtttagaattatttaccagtgctaggaggagcatctttatatatcattcttcttttctgtagtttccgtggtagccattcttaagtaggatgtacattgactctaaaatcttaattttaaaaatgatcttaacaaattagcctccatctgtttttagttatttttctcttcttgcaagaatatctctctctcccaatctctctctctctctctctctctctctctctcacacacacacacacacacacacacacacacacaccacaccacacacacaggctccatgcttactatgagctcactagttgtagactaggaaatgatatgtacctaagagcacttgtttccttatcacaaagtgtgctcagagatttcataaaaatactgtgcactagtcaaggttttgatcatgac

SEQ ID NO: 35776 - DNA, 1169 bp, Mus musculus
cacacacacacacatggcccaagacactaaataaataagggtaaaacttcttttttaaaagagccttattgctctagtgagttctccaagattcctattggaacgcatctataattcaaatgcacaagactgtgctgtggcccttttccaccttgttcttctcagcagcattaactgctctgtcccttaatcctcagtagtctcagtatgtcttagggtttaatttacaagtatgttttagattatacatttcttagagcttttggccaaaatgttaacttaaattttcaaggagtgctttttataaatggagacagagtgttgtgcagaaggctatataccccaaagagttagtattctaagaatgagatctctcagaggaagatgacattggcaatgaacatgtccatgattctaccttgttgctcttctttacacaaggtgcaagcctttcttactagttagctgagtcttcctggaaagatcgaacatgaaggtacacgaattgactttattaggcattgcccaaactaatgtgttctccactgttcaagtataagcaggccctcataaggtcctgttgaaggtcttggtggatgtgaggagggtggagtgtgtggggttttatacttctctttgtaaacattcagcaaggctactggtaaagctggaagggtgtgttctgtcctcagtgtaaaaaaactcctgtaggcaagtttgaatttcccaatgtctagtgttttcattggagaagaaggttccttcccaatttctcactatgctctgccttcaagatgcacgtgtttgtgtgtgtgtgagagagagaggagggggaactcccacacacatgtcaattgctgaagaaaggggtcttttgctttggtaagttttcatagcactcagtaattcaatagattatccattttacttgtgtgaacctgctaagattggatagacaattggacatgacggtgtcttcaatcccaacattttggatgcaaagataggcagatgagtttgaggctagcatgatgatttccagttcatccagagccacgtgattaccctgtcttaaaaaatggattggatagatatggctatttttccagactcctgataatttatttttgccttgaaaattttatacatgcccaatggaatatttgtaa

SEQ ID NO: 35777 - DNA, 1184 bp, Mus musculus
ttcatgactttgtccaagtatcatcacaggcctcaagagttggaataccatcagggacacagttccaagttcttggctcccttgagtgacaactgttgtctgttgagcaacatcagacacttaaagtggaattctgctactgagaaatgtatgaccttgaaacctgtcagtggagcttcggaaaagaggccgctgagacttcaaatacaccttcctgaacaagacacaagcaactttgcaccttccatgtatgtgtcccagatccctgatgcacgggactgggaatatactgactgggagcagaaaatgtaactacaagagagctgtgggtgccaatataataaaaccgtggatttgaatcagctgtggccagccaagaacaacaggaccaaaacaagaaagggggattgctatggctgggaatatagcagaacaaaagactttcctaggaagctgaagtcaagccacagggccctagtttggctctgtcccattgttggaaaggggataacagaactctttgagtgaagaaagcagttgcctaggtattgggtatgttgagctaccttaggccagtactgtgttcttggtgggaaagtggggggtggaactaggagtgcagcaaggctggaaggggctgggggaaagcaagcaaggcaaggaagagagcccaggaagtgttgagggttgagttacagtttcatggcattcccctctgctgaggtaagatgcctccttcctgttagaagcagatgagtagctctgggcatgtttatacagctagtgatgttgtcatctaggaaagtttctgtgtgtcaaatcaatatattttattgagactttgagccttttgaaaataaatatctgatataatgtcacagcctatggagaatctattaaatcccacttcttatagattttcttataataaaaccacagcctcaaacctattactgtctttggtggccaggactgcagagatactgaatttttgactgtcaccatttcttctcctgaaacaggaggctgggaaacttgtaattcagcagtgtgcacggtaatagtaggtagctcagttggtagagtacttgcctagcatacatgaaaccctaggttcaattcctagcattgcataaaaccaggtgtagtggtaaatgccttgaattctaggactcagaaggtag

SEQ ID NO: 35778 - DNA, 1276 bp, Mus musculus
aacacaccctctccttcccacctctgggaatcctggctttccaaacaaaaggaaagtcgaactgggagttcctcaccaggccagacaggccagaagctgtgaatggtatagacctgatgtgagagaaaggtcctgcaactcaaatcctctttctcttttgacagaactggcctatgatctggatgtggacgatgctccggggaacaagcagcatggaaatcagaaggacaacgagatcaccacctctcacagcgtggggaacatgccgtccccactgaagatcctcatcagtgtggccatctatgtggcgtgcttttttttcctggtgcactgacttgccagcgtccagtgcctgtgctgccctgcagcacctgtggtccctacagaaagggagccaccttcttttttttttctttttttttttttttttatcttttatgcctcctcccaccaccattaagtaggagactaaccgcgtgttatgttttcgaaaatcaaatggtatctttatgaggatggtaaattttagtggtaggatagattgtctttttgcaaagaaaaaaaaaaccttcaagttgtgccaaattattttcttacatttgactgttggaacatggttgtcatgtttccctcttttctctttctctgcatggatttctttgacaaaaaaaaataaataaacattcaaataaatggtgttggtccttttttaaaaatatatatatatatatatatataaagggtcatatacttcttcctttatccaaattttgctcttattatctggccttctattcagtataatcccattacaatccaaaaacaaaaacaaacaaacaaacaaaaaccctgcaaaccacttctttacctatgccttctgaatgagtatcaatgctggctttgcatcctgattaaactgcccattcttaaggtatatcacatgcccagtctcttccattgagaatccttaggttggattgtcctgtgtatgagatcaaaggtgtcacaaaagagttccaccatgacctctctttacaaacttcccttttgaaatgaagagatgcctccattgctaatgtgcttgcttgccttgaaagcttgaagacttgagttcaaaccccaggacccatacaaagagagcaaagcctagtggcatgtgtctctaatcccagctttgtaaaaacagagacaggagaaaccctgagtttgctagccagccagcctattcagtgagctccagaccagagagagagagagagaaagagagagactgtct

SEQ ID NO: 35779 - DNA, 1246 bp, Mus musculus
aaatggatcttaatcccaaaaacaacagagacatatcaaattcatttacaccctggatttcatggtttaattttggggcatgtctttttctcttattttacagaggcctttgaaattgttgttcgccatgccaagaactacaccaacgccatgttcaagaataactaccccagcctgactccacaagcttttgagtttgtcggtgaatttttcacagatgtgtctctctacatcttgggttctgatatcaacgtggatgatatggtcaatgaattgttcgacagcctctttccagtcatctacacccagatgatgaacccaggcctgcctgagtcagtcttagacatcaacgagtgcctccgaggagcaagacgtgacctgaaagtatttggcagtttccccaagcttattatgacccaggtttccaagtcactgcaagtcactcgaatcttccttcaagccctgaatctcggaattgaagtcatcaacactaccgaccacctcaagtttagtaaggactgtggccgtatgctcacccgaatgtggtattgctcttactgccagggactgatgatggttaagccttgcggtggttattgcaatgtggtcatgcaaggctgtatggctggtgtggtggagatcgacaagtactggagagaatacattctgtctcttgaagagctcgtgaatggcatgtacagaatctacgacatggagaatgtgctgctcggcctcttttctaccatccatgattccatccagtatgtgcagaagaacggaggcaagctgaccaccaccgtaagtatcagtcttcaggtttcaaaagaactgtccttcattgtggtggtgggtggggtgatctctccagcaacagatactgatagaaaaatagagaaaggaaaaacgacgagcaagtgagaatgcagatgggctgaatgtactctccgagatagacagaatgttaaaactacagggtatagagttgtaatactagatctagctccacatacttctttgctgccgagtattgggaacaaattttatctttatgagttttatgttttgagttcatgaaagaagaatagcttgtatttgagacatatagcatctgcgtggtatatggtaagtctttattaaacattagctgttattgttgttatcaggatccttatgggaatatttcctctctctcttataaacaaggaaactgaagcttagtggactgtatgttgcacaggggcatcca

SEQ ID NO: 35780 - DNA, 1162 bp, Mus musculus
ttacatacagttttagaaaaaaaaaataggagaaagaacaatttacagcctcttcggtgctcctaagagacaagaagaattccagaggtaaaaagtatctctggttccaagggtcagaggcccaagagcttgaatgggaggatcaaaaggtcaaggcatttgatagggctgttacattcttatgacatctaaaggcaaaatctagctgtaacacttgtggtgtatacctgaaggaaattagtcagcacacacagagatatctacagacccatgtttattgctgcagtattcatgagagccaagccaaagaagcagcctacatgctcatcagcagatgaatggataaagaaaatatgttaaactgcaacttcattcagtcacaaaaaaaagtttgcagggaaactagtggagctggagatcattttattcataatataaatgagattaaacatgaaacacgttcattttaaacatgaaacaagtttatgttttttctaatatgagaaaacttgtgtttatcactgtctacatctatctatctatctatctatctatctatctatctatctatctatctatctatctatagattaatcaacctgtttatccatctgacatgaaattatgagataagaggaagctgtctaaagggagggagaattagagaggataatggggtaagaaaatataaaataccatgctacatttatatgtagaatctaagtttaaatacatacacatatgtgacctgacagaaaaatgagggctatgtccagggtaagatcaatgggctgagatataggggaagtacgggggaaggcagtatataagcaaggcacactatatttgtatgcaaaagttattatggacattattttgtctattaactaaacatttaaattaaaaaagaaaaatataaagaacttcaagttttttttttaaaatagaagggggaggtggctgcttacttcctgatatatgtgtacacacacacacacacactggcatggcaggattgtgagtattgattagattctcaaaccttggggattaactcatttgtccagtgaaacttcttccgtacaaggatgccactatgtaggagttggaaaccttcctctatatcactatattggttaattttagaacagtttgtttttga

SEQ ID NO: 35781 - DNA, 1099 bp, Mus musculus
cattatcttgaagccatggagatttaagaaacaagcaagtttggcctctctttgttgagcttatgaaagccatatttagtcttctgaggaatgtgtttttcccttgggaggcccctctatacctgcagccatcagaaattccatagtaaaagcccacatttaagtctttacggctgaagtctgttcttgtgtgtctggaccaggtccagctgtcagacccagatattattgactttttcttttctagtgagtggtttacatctgctggctccatttctttaccactaattctgaaacaccttgtaagctgactcctactgcctctgtattaaaattgtaccctcgaagggttacaataactgactttttggctgtagtcagtgggggattatttttcttcacttctttcttaccccttactgttacttttcccctgttttttgacacgacatgaatttccctttctctcttcccctgactttgcttctctcctttgggacagcagatcttttgggctctttctcactcatggaaatgtgactactctcctctaaaggatgcattcagtggtgcgctcatggctttttacgcttcattcaatctcatgcttctagctggtccctccatgcaactaggtcttcagttcctacttcttctgacccatgctccagggctgcatttccattgcacaaaatcaactgggatggctttttatgagccacacattgtattatgttcttcctgcttatgaatgttgataacttagtattagtaacagctgacataaggcatattcacagctgatctacacatacacatgttaagacaatgactttgaaaaccactttaacagattattagggaaaattcaaatgtccattggtggggacagtgtttcatctgtgagccttatttgcataatgctacaacacttacaagttgatgctataaaagatctgagagctgacaaactccatgtctttcctgtgcacgtgacagaaccaccaggccacatcagttcattacgaattctccacattccaaactgaatgctttacttcgggtatttttatgctgctagcacctctgtgaccatttt

SEQ ID NO: 35782 - DNA, 1159 bp, Mus musculus
gcttggaaaataagttctgaagcccgttcactcatctttctgctcaaatagtcagagaggaataaaaccaattgcctcagctcgtattttgagacttctagatgggttctcatttatatgattaaagaaaagatgtacgaagatgttaacaatctccaaccctagttgcaaatctgagcattggatgaaattgcaggcattaaaacgtgagaattttgcctgacaagtttactttcacactcatacatgcgcgcacacacaccacatctttctaaatgtacttcagggtgggctttagagacagggccagactattcagtgttggctgacctgaaactcactatgtagacaagcctgacctcaaattctgctgggattaaaagtatatgccaccatggccagtaaggggaggcggttttagtgtcctgtgtttggggtttggcattttagctcttcttaaatggaacgagagcacatggttattcatatttactaccaccgcagttttcaggttgatttttgggaagctgtgagttgtagaaggctaaatcagcagtatttgaaagagggctgggaaaggagtaaaggaaggcttgggggctttggactgttcttattatgagtttcctttggaactcctttccccctttctctaggataaacatgacactgcttttgggaaaaaccaatggcagtaataaaatgcacatgacagatcctttgttttaggccctcattagtgcagtagagggtaggtctgttctcataaacacaaacagcaaacaagagcaaataattaacattggccatggagccttttcttctgttatgaactcaatggggtttcctttaaccctcccacaaggctattaatcatacttgtaaatgcatttgcccccgaagcttaaatcagttgtgtgcctctggcaactgtggctgcattaacactagaccatttaaacttgagatttaaactccaaattctcttctattttttttaagtcatggtggcagagatcatggcttatctactctattaatttacacccagttcataatttagtatttccatttacacatgatggaaaaaccatatgctactcagactctttgctatcgttactgcttcaggtattcctgttttccatggcatctttcc

SEQ ID NO: 35783 - DNA, 1121 bp, Mus musculus
actcttcctagacttgctggctgaccttgtcatctgccactcatccttttctcttagagtggggacagggctagtgtgccaaggatgtgctctgacttaagcaggcagcagtggaagtgcagctctgttagaactctttgtgtccaagggaaagttcctgccctttgagccattaaataagaagggctgtgaggtgaaaggtatgagggaaggtataggaaaggtctatgctgccctttgctacaaagcctagtgattacaaccaactcagactcagtttagctggctttcaatgagactgatgatagttattgttttcttactctatcttgtacattgacatttgtaaatgcagttctatatggaacacctactttcactatattgaatggaatatatctgtcacatacacattttttagtgcttttaaagctttgatataattaaaatgaatataagattatagattggtattttagagcattttatgttcatttaaagatggtttcttctgaaactgtacctctctctctctccttatccctctctagtgtgtttttgtgagtttctctctctctctctgtatgcgtgtgtgtgtgtgtgtgagagagagtgtgtgaatgtattcatgtatttctttaagactacaattttcaaaatggttccctagtggtctgaacgagtctcacatagtctctcaatctaacctgtaagaggaataactactctgatttctattgggttgtattagtcgcattagtagcatgacttcctactctcatgtcacaaatcactctgaacaaacttcatgctacagggatgataatctgtgaggtgggtgacatgtcagctcatccaaatatgctcttgtgtgttctaccacataagggaaaagaaagtcgcctttcttaaatgtctcttgtggatccaccttctcagcctcccttcacaaaggtgctcttagttccaggaagaaaagagacccagtgtgtggtcacttaggcaagtaactttatgttgaatggtaagttttcagttatcgccctaccttacagtgtgcttcctcactctcaactaggttagtagttcttctaatttgaggaccatgaccatgcatgtga

SEQ ID NO: 35784 - DNA, 1194 bp, Mus musculus
gtaatttacacgtatcatttcatttaatcctcacaatccacctatgggtgggtctttgttatccccattttatagatgaaggtgcaagaccagaatggttaggtgatttgtcaaggctacccacctaaaattaatagtgaaggcaagatttgaatccagctcacctggtgtttagaggtgatgattttatcccctaacttaggctacctcttgccactaggaagattacttgtggatatggagcttctcttccatcccttccttatagttgtattgggaggttgctgtggacggctatatacttggtaatgtgggtgtgtgcacatgtatgtacatgtgcggaggtcagatgtcaatgcatgtgcatcttcctctctcccgctctaccttttatttttttttttttgaaagaggctctctcacttaatgtgaaccttacctattcagctaggctaactgaccactaagctttagcaatcctccttggttgctctccatctccagtgatggggttacaggcccacactgctacacctgactttttctgtgggtgctgggtctccgaactccttacttgaccagctgaactctccccctaacctgcgtttctcccttctaaactaagaatactgaatcaactgccacttgcctttaatgttggcttggggtcagagctaacactttggactatttgacattcttaagtttcagattaatgacacctttacaagaattaacctatgaattataaggtgggtcaattataccttattttaggtatttaaagtgaaattcttagcattagctaaaatgttgttcaaattagctaataaaacatacattgccaatggtttcttgtgtcaaaagccccagggaatattgatgttaggttcattatatgaagtataatacaaaagcgtgaaatctttgttaacctatttatgcagtgaggctcccgtgaagcatttgttgagactaacaatttagtgatagaatgaataattcagaccagtttaaaaaatacatgcaccattcatgtacttcttagattggttttggagttgatacactggctggaagtggggtgataagtaatgttacaagaggattgggaaaaaaaacccaagaggattgggttgaagtggacagatgaaacagtcaaggcatggaggtacttgatgagaatggaacatt

SEQ ID NO: 35785 - DNA, 1150 bp, Mus musculus
atgccagagcgcccagtgtagagcagcggcgagcgagtgtcagggcaggattgccgggagccaccgcacacgctccttatcctcttcccgcgcctctcccaccaaggcttgcccgccaccttggtaaacccaatctcccagctaagctccttgccacgccccgcatcccgcaggccagcagctacacgaccccacgccgtcctccaggcagcgcggctcgccttgcctcgccccgccccgtccctcctcgccacgcccacaaggctccgccccgggccgccccgcaccgccaagctgttcccgccctcgcccagcgcccaggtagctgcgaggaaacttttgcggcggctgggtagcggctcctctcttgctctgtcgggctactgccagacttgctgagtctcgggaccgctccggctcttattgccactctctcgtgctctcctcgctcccccaagaagcaggatggccgggaccgtgcgcaccgcgtgcttgctggtggcgatgctgctaggcttgggctgcctgggacaggcgcagcccccgccgcctccagacgccacctgtcaccaggtccgttctttcttccagagactgcagcccggactcaaatgggttccagaaacccctgtaccaggtgagtaggggtcccttgagcattccccgcgcacagtggaaagccaaggcgcgcgtggtggctcttcccagagcgcgctagcctggtggggccgcagcggccgtgctctctgctgcaggatacctgggaatggttgctgtgcctggggcctggaccatctaccaagggagggaagcacagtatgggactctgtccacatgccccgggctcacgctgctgtcaggaactgtgcaagccagagcgaggaacagcagagatcgcctttctagcgcccattttttttgggggggggagggcgggaaggtgggagctggctcccctctgctcttagcaaaccggcttcacaacgtgaagactgtgactcgggaatttatctcccttactagcacgtctgccttagctggacccgtagttctggccacactttatccaccgtgtgtccccccatgctttccgttccccagtctgggttcccgaggctggccgggcccaagtgcaggcaaagttgagcac

SEQ ID NO: 35786 - DNA, 1182 bp, Mus musculus
acaaagggggaaaaaaaagaactgtaccttctttgtcatagcaatagcaagcagagactattcagtttctaaggaactgacaagcttttgcagcccaaggcaggtttccaaaaggaacacctcttgctgatgatatagatgcctgtggatagtcagtccccacagttcagttgtggtgctggggatgaaagtcaaggaatcgtcaaacatgttagacaaatacttcaccactgagtaccaactccaggccataatgaccaggactgaaataagatattgttaaaactaatacctcgctctttgaccgagacccgccaacatgggccgcgttcgcaccaagaccgtgaagaaggctgcccgggtcatcatctagaagtactacacgcgtctgggtaatgacttccacaccaacaagcgcgtgtgcgaggagatcgccatcatccccagcaagaagcttcggaacaagatagccggctatgtcacgcatctgatgaagcggattcagagagggcctgtgagaggcatctctatcaagttgcaggaagaagagagagagaggagagataactacgttcctgaggtctcagccctagatcaggagatcattgaggtggatcccgacaccaaggagatgctgaagctcctggactttggcagtctctctaaccttcaggtcactcagcctacagttggcatgaatttcaaaacaccacgtggagctgtttaatctgttatgccatattttcaataaacctgaaaacaagaaaaaaaaaaaaaaactaatacctcgtgctgcaaagagaaaccgtgtctcgaatccccccccaaaccaatgacaaaaagcaaataaacaaacaaataataaaaacaactcatacttagcaatctaacaaacaaatgcatgtctttcaataattatatctgaatttactaaaattacaaatgatattatcatatcttaatatacatcaacaaatcatattatcaataggcatattaaatgtgttgatgaaaataacacaaccaggccagcaaagtggttcatgcttttaattccggcaatcagaaggcagaggcaggtgaatctctatgagtttgaaaccaacatggtctacatatagtgagttctagagttccaggacagctacagatatataacaagaccctggtgggtttttcttg

SEQ ID NO: 35787 - DNA, 1220 bp, Mus musculus
attgtaatcaaaggcaacaaaggcgtttttgctttgctacagttaaacttcatttacaagaacaaaaagcaggccatgttgctctcccaggacatttgccatagagtatttggggaggaaaaagaggtaaaatttccctgtgaagaactttttcttcatctttgtaactgtgtacacgtgcattaggaatgtattcatgcaagtgggaattctttttaaaagccagttgtggcatgcaggttaattttaatgtctgtaggtattttatcagaaatttctattaaagtgaactttgcattcgtggtgattaagtagactaagcagtgctggagaaaactgtctggctattatggaaatgcatttatttaaatgcaatcttttttctttgccttcctgtagtcgttttgcaattgggagcactaactttatgtcatagaattctcatttgtgtttgcgaatggaggagaactaaaaccagtaatgtaaaggcagagctccgctcaggaggtgcagctcactgcaggattgtttgtacagtatggtcaagaacctgagttcaatcctcagaaccgcaaaaaccactggccagtaatggcaaatgggctctgtgtggcttgggggactctcttggtgcttacttgagtgtgcctgtgttttgggccttcttcacagattaaatatagcaagcatcctggcagttcacaatattcacagctgcaacgacccatagctgagaaaaatctaaacaaatatgtttgcacttgcaaaatgcctgaaattttcagctgaagaaaatgggaaagaagcaaacttgacgtgctccagtgggagactgtttttcttatcagacatggtttgggtaattggatcgagttggaatagttgagtactcagcggaaggtcagaggggatagattaggcaagaacttcccagtctaagtttactgtccttcaggttccaagtctccctcaactacttcatttcctctgttactctggtaaaaaaaatatatgacaagtgcttttcattggctctattgtttttttagagatacctagaatttgaagtccaaatctgtcttctaagcaacttgtcactacttttcaaggatgtgagtgttcagattttattgaggggttttagcttccttttagacttcctaagcctgttttgatttgtgatccccttcgaaaagactggttttgaaaacacgagtaga

SEQ ID NO: 35788 - DNA, 1126 bp, Mus musculus
tgagtgaaacactgttagtggtagaattattttcttatttatgggaaaaatcattgtatttctatgagtttaatgaaaatgtttacagctaactcacaaaatggctttttcttgccatttcttcttgttagagcttctttttgtacttgggacatgtttcattacttgatgagttagctcaatcatagatggctttgaagctgaagctgtccattcataatggaagaactgtctatatcagtgctgtgcagtcgaagtgcagtgacggaaggaaggaagcaggtcaggctgacactgttgcctctggcctggtatggctaattcgtttttgagatctggtcagtgtgactgaaaagtgagattcttttattataactgacctaatcgtgtttaaaagccaaacaacctgtatcacagaacccatttttacggaattacagaatcaaagcaaatgaggttataatggttccaatcaaaaggtctgtattcagttatttgaaacactggattgagcccctttgagtagaacatagaccaggtaggtatcctcgtttctaggggccatttcatgctagcgaaaagtgtagttcctgcagactcatggacctactgctgattgttaaaactgacccatataaatatagcttttgtttctttttgagcagctgatttagaagaaagttttaatgagcatgaactggagccctcatctccaaagactaagaagaaaagtcgcaaaggaagaccgagaaaaactaaccttaaaggcttgccagaagacagcaggtccacatcctcccatggaacagatgaaatggaaagtagctcctacgtaagtcaaacctggtgggctcccaccattgccggcaccctgaagactttcacttgaactgtgtctacagggaacttatactgtttgaagaattaaataagccttgaatccatttataagtggtttcctccttttatatttacagcgagataggtctccacacaggagcagtcctaatgataccaggcctaaatgtggattttgccatgtaggggaggaagaaaatgaagcaagagggaaattgcatatatttaatgccaagaaggcagccgcacattacaagtgcatggtagg

SEQ ID NO: 35789 - DNA, 3343 bp, Mus musculus
cagagagagttagaaaactgagaaaaaacaactataactcctgtgcttcttttccacttttttctaaaataaagggtttgtaactttttactgcccgactcttagatccttcattgaactgcctaaatcaccttgttagttttctgagccttcagtagacggccgaatttgacatattgatattacgtagctgtagtttgcagtttctgggaagcagtcaaaacactattagccctgtgtatactgtcagcagttaaaacagacattgaatgaagtaaactgtatttctggacagaacaaagttgtactgtttagagtatgtaagtttgtgtagtagatccacgctcaaaggaaaccagaagcaagttgtactccaccttgcaaacatgcctctggtagcaacacctggcaatttgggcaatggaaacgacaaatgaagagactcttctttttgtcttggctttgacagcacatgctctaaccatttctttcacgaagcgtgctgaagcctacctgtggtcctttttagagttattctcactgagcagcatggactctgggcgactggtgatgataagctctgagctccagtgcttctgccaaaactctggacagtacacctttctgtgctgtacagagagcttctggcaaaataatggaatcgtatcaagatcaaaataatgtttggcaacatcagattaaacctctttgaaattcaagaggtcagcaatgcgctaaaggactttggacatcatgtctgaaaccagcttctctcaagtgccctgttgtgtggaacacttcacatattggcccagcatatataaggaggtcttatatgctaacattttttttaaaggaaccatctttgtgcaaaacagtatttctttttgactctgtgaccactattttagaaacattatttaatgctttcagtcatcagtttgcttacagattgaataagcttttgtgccctgtttttcttcgagggctcggaagtgttttctcaatcaccagatttttagaaaggctttctttccactggcatttctcactcgtgacacacatccacttacctgctgaagcacatttacatatttctttatggcaaaaccaaaaaagttagttgtggtctgcctaatattaccatagcacctcagtatgaaaggtaaggattctgagttccacatcattagttaacctcccatagtgaatcagatttgcaaataagaaataacgtactaacttgactgtacatccatctattctgtagctggtagaacagcgttttgaaatgtaacaggtggaaaattacactgtgcttattgactgaatttttaaactgcttgtcccttaagatcatgtttgttaaggtgtgtatttacacatttacttaaatcaagggactcaatgcttgctttcttttaaccatcttttattgttattttagaaggaaactagctttagtggattgccttgtgcgtcttctcctttcgctcttaatatgccatgatgtgtatgtgattaattttcaaggttcatcatgacttgaagtgcaaggacagatctcagtttgtttaccaagcgatgcgacttttcccaaaggatctgtactttatttccttataacagcttgaaaaccattcttttttaaatctttaaatcactgtgtctaggtaatttttccattgtgtgccatagaacttacccatggagaaatggagccccttcatttttggacaactactgtaatgattttttttaagaaaaatggaaggtgccaggggtaattatggccagtcaataattatataaaggacttcaaatactatagccgtcagttgatggatttgatatgtagtacatgtatgattttgtatgggtttcttcagccctttctctgccactagcaaccagaaaagcactttaccttttggttggttagataagtggctaactacctgtttttctcactgtggtgtgattggctagataaccttcatttaaagttgaaatgtaaactgaagtcacattaaacactcacgtttggctgtaaacttccaatagtttgattctttgttcctgttttcattctatgctgagtaaaagtgccttacaatgtaaaaattgtacagtacttacgttcccaagtagcagcttcaccatctggctaggcgtcacattgtggtaggagtattagatcaatagacctcagcagtgtatttactgtacaactcttaagtccttaactgtagttttaataagcatgacattatttggcaaatatatggcatttacatcatttccaaaaatactgccattgctgtctactgcgtatttttagcctgaaattttgatgcgtctttttttcttgtttttttttctttatttcttttgttcccttttgtcattattaatattaaaccgtgtaatctttgcaagcgtatattgaagattattctggagcatttattgccttaccagaaatgttagtaagaaatgttctttagagtagaagggtagacttgagtttctatactttaataagacctctttgttcctggggggaggggggagttttgctttcatctcattgttttaaagcccacacaagaaattaatttcatgtcaaggatcagcagttttcaaacttgaggtggttcttagtacacacgactcaagatactaacagagtaacatgatctacagatctgctattgaatcgaatctatgtacttgaacaaatgtgtgaatctcaaatatctcaaagcaaaagtgttgtagaatgttgttgctttttgaaaaagcactgaagttagaccaaggcacagttttgttttagcagacatttaagttaattgtaaagataaggaatgcatcatgggtcaaaaatcaaacattcctcaatgttatgtatattttgttcctgttatattggctttattttcaaaattgtagtttgtagtattagtttccttttaatggtattcttgcatatactattcattcaataaatgagttctggatttcaggtctgtgtctgctttgtaaaagtgtgtatcgggttatttgtaccagcaatagtgccatgtttctttcactcttcctttacttcaaggggaaatacaaatgcctaggatgtttaataatagctcgacagcaaacagatatgagagggggactagcgagtagttccagcatactcttagccttgacttcagtcccctggtatggtagataaagcacataactcaaaatgcggatggactggaggggtgtggttaaacaaaaatgaatatgatctgcccagagtttcacaatataaagatgtcatcatggaaagaat

SEQ ID NO: 35790 - DNA, 1388 bp, Mus musculus
tctggaggcaggaaggagtcttctgggtgagtttataagcatggtccaggagcagttagaaagtctccatgggcaatattacctaaagcgtattttttatttcacttacctgttttgatttcagctttatgtttctcaaagttacgtactaagacaaagaaaaagcaaactaatggactatagttctgctttgttttcaaattatgtcctcttcaagttgctggtccaaaataccttgtttggtagaaacccagacaacgtaggaggaccctttaatgctgttattacctctttagaatccgcttttctaacgagaatgtcttttattttatagcacgtttgtgtcattagtgaaactggaaaagccaaatacaaagcctaagatgagcgcaagttgaatctgcaaatacgaggagtcctgttgatgttgccagtaaaattagcaggtgttctagtcctgtggccatctgcctagtaaagctttttgcatgaaccttctatgaatgttactgttttatttttagaaatgtcagttgctgcgtccccagacttttgatttgcactatgagcctataggccagcctaccctctggtagattgtcgcttatcttgtaagaaaaacaaatctcttaaattaccacttttaaataataatactgagattgtatctgtaagaaggatttaaagagaagctatattagttttttaattggtattttaatttttatatattcaggagagaaagatgtgattgatattgttaatttagacgagtctgaagctctcgatttcctatcagtaacagcatctaagaggttttgctcagtggaataaacatgtttcagcagtgttggctgtattttcccactttcagtaaatcgttgtcaacagttccttttaaatgcaaataaataaattctaaaaattcgccactttttgaattctttcgtgtaaaagtccttaaaactaaggactgtctctttaaagaaattctccatgtctgtcatttctctacagattaattcagtacagttttccatgggttcccctttgcttacgttttatagctaatttaatggtactcctcagcaagtattgcaggtcatggttatctggtggaatgggttggtagagcgagggaagcgtctacctactggaaacagtaaattacagacactcagcaccatttcctaacctgtcttctattaaaaagaacatgttttctcctcgttttctgtgaggttgttcagactacaatctgacctatagtttgttttcaggtatgtcctgttacccttttggtttggataaagctttattgaccagagaacagtaacagtaaaacattgttttgtcttttgggagtaagaaatatttgggaccaaaag

SEQ ID NO: 35791 - DNA, 1129 bp, Mus musculus
gggggaagggaactttttggcccgcctccccccgcccccaactatgtctctggtcactacagactgtaacagatacggggataattctcaaaaaaatgttatgcgtcgcgctgggtggggtgtgggggtggaaagcgtgtccgggggtcgtggtggggggaggacagatctttaaaatgtctagcaagtgagtgtggccagggaacttctcagaaagtggactgagaagagtaaacggggaggggtggggagagagaaatgagtgaggggcgggcagcctcaggctgtcagccttgccagggtggggagcaactagttttgacagactgtaaatgggactttgggccactcatttgtaagcagtaaagaatgtcctggaaagaaccgtaaaattcgttttccattgtctctcgctaattaaaacttttcaaggttgtttagttgttttttttttttttccagtattggaaaagtttggctggaaggtgcggaggacctgtgcatcatgttttgggtgtgggggcgcatggcatctgcaacattaaaagacaaaacgttctcaactgggaagagaggaagaggcttagtctttggctcttaaatcatttggccaaacccttcgcagttctgaagtgggtggggccattttgacccgtcgtggttctgaagtgggtggggccatggtaaccctaaagtattgattctttgtctattgtatcagcgaatgaccctctctagaagtgaccagacatctctttgtgctctcttttcgtaagtaaagttaagcccaaggggaaatacacaaacccagggagtgagatggctttttaaggatataagtcgttgtagagtgatgggaagaaaagaaatggatgaaggataatctagagatgaatttgattccagtgtattcgttaacaaaattatctagtaagaccttcgtttttgatgatgttatctcgaatgaattttgtttttatgagtagtcaactaaggaaatgttaaattaagaggaattgcaatctctgatgtgacatttgtgtgggacataaagttaaattgggagaaaaatacgtatctttaaagtataattgtatctttactaaacacggcttttctctctcctctt

SEQ ID NO: 35792 - DNA, 3510 bp, Mus musculus
aatacctgggaatcgaaccaagaaaggcagcttgatgtcaagcagagggttttggttccatggaaagtatgaagaagccaggttttgaaggcaggccaacgttgatttgtgggcatctgagctggttggaaagcatgtccctgggattgcttatggaagcccttggtgtccaaatcagtttcagggggaagatgagagcagaggccagttgtttggattaaagagacgtgatggagactgtgagaagagagcatttcagaagctcaggtggagaggaactgagaggtggaaaaaaaggaggctcttatggctagcaggggatatttgggtctgtaaagaaacaggaaaacggattcataaaatgaaaagaatagcaaagacatgtacttagaggggaaaatcattcaaaatattttccttgaagcctcttgggagtgggcaaggaaaatggtcagtttcaggcagttgaaagactttcctcaaaaatagaagtaatatttctgaaggcacactcggcaagtttgagaacaaatagcttactaactattaataacagaggttattcttgctctgagactcttgaaaggtaagaagataaatatgaagatagaaatatttcagacagaggacaggaacccccctcacaataaacctggcatggtaagagggacagttaccatatgttagatagtcaggcgcctccatagggataatcaaagtatatgagacagtgtggcaagtttcactttgggtttctgtggctttatgaatttcacaagtctctcaacatggtgtagtatgcatttcagtgctgtggcctttatgcttcttattatttaccgatgctgtactgatgcgtgtgtccgtgaaatcatgtcattgcatgttatgttgaccctgatacatgcattcgcttataattctttttgctttgtcctcagttcagatattttggatggcagtagtatcagcagtggcttgtcctcagactcactggctacaggcagcgctcccgcagagtctccagtagcatgctccaattcatgctctccgttcatcttgatggatgatctctcacccaagtgacttaaccatttctgattgagtgttttaactgtttcccacataaaacattcagtgaggaatgcggagaactttgatccacaatggggattaaagtttggcagattgcaaccattccgatgatgctcctatttctgggcatctctctctaaagttcaattttgcaagcagagtcaccttactaacatctgtttgggctgatctcattttgcgtttgatgactaaatctcaaatacacatttctgattgcttggaggactttttccctagtgcctcaaagagcacctactttcaaacatttaaggggagcattcatgcatattctctataattgttcttttccctagcagtggcaaaacagagttaatcagaaattctcttgcttgagagatttataaaaattctctgttgactacatactttcccatctctttatttcatggtaatattcaaattgtttttgattatatcaaattttcattttgtctgcatcagctttaaagaacattgttttgtttcccttgcctgtttgacctgctccttgccatttctcaccaaggggaagaaacccatagttgcttccatcaccaccattcttgcttctttgctattggaatgtatgcagtaacgtctgattttacaatgtagaatgaactagacttacaggatgcctgcattagtcacctcagggtcttaggactttgctatcacagttgctatttttctccccaaacctggtgccttaagggatatataaaatattgttgatatttctaggtggtgttatcaaggagaagaaattcctgccttgaccagatgtgtggagcatctacaaatgaacgaatagttatttacacaaaccactgtacaaaagcaagcaagcgtccatgaagctgtcagtgtcttgggtagtattatgaggccttaggtgccttggggtacattgccgtcctgtagggaatatgtgtcgtagggtcttgtggaaatggaagctttctgtatgtgcgtgctattctgtttgatttttttttcctgattccctgttgtccttgagtttgttctgtcatgtggtgaccgggtgttgttggtttttgtgctgtgctagagtcagaaccctcttcttgtccttgttgccctatagaggtcagtttaatatcttaatatcagttaaggaagctttgaggagctaaaaaggtcagtactgctgtgccctctgcttccagaagtgttttgagctctaagcagtgtatatgcagtgtgacgtaacatatactctgtaatttttacaaaagaaaactcctgactaaaatatttaagaaatccacgtgtgatctattgtggcagtatttattatgtattacactagaaatggtgtaatagtgcgatgtctgtgcggttaggtttcttttaatgttcaacctggtggatggactatttgtttaatattcccactagaatcgtgttattaagtgaatgtaaaaaaaaaaacaaacagaaaatgattaagcataagtcttttgaaatctaaagtccttggaggtggtttgaaggtatttacagactagaaattagtgagcttgaagcaaaacctctcttctaattatcagagaccatcacttagcttgctgcagttccattatagaatcaggtcttaagtttacattgtaatcactgtcataaaagctattactggcctgagttcccatgtttctttagcctgtgaaaagctcctaatcctccaaacctaacataaatgtgctgttagaagactcgcccactcctgtgctattttaaagaaacaattctttgatagcactcggtgtatccactctgttaatgaaccgtattcaaaggctcttgccttcgtaatgataagagatgagtttttctttcaggagatttgtctgccttcactcttctgtcttatttgccttaaagggacactttgcagttcaaatttagagtccagatttaggattcttaaaaaataatctttgaaatgtgatgatacctaaatttgtgtttaaaactcaatggtaaggtaaaaccagagcagaaaactgaaactgtcccaatggtatgatgagatcaaagaggcaggattccctttactgtttgagaccaactcttttactaatgtttctaattgagtgttttcaatttgttctttctcaattccatactcatttaaaattcattctgattactcttgccccctaccctcctgcatctctgtcccaaccatcagtcaccacttcttcttacagattcccttatcacattcttgtctttttcgttgtaaagtaaccttttattattgttgtcttctatattgtttaaatggactagaaagctaagtttgtgcagggattgttttgaaataaataaaactggtaatatgctaatccacagagcagctttgttgac

SEQ ID NO: 35793 - DNA, 1447 bp, Mus musculus
ggtttatagggtcatgatgtcactggaaggttgaggagatgtgggctgagacccatgctaaggccctgtttctctgttcccaggcttgcaggcctgtccctggcatcacatgggaaacctcatccagataagctggggacagcctgtccaggaggccctctgtaggctagaagttgtgatctctaaatgaccaaggacagctcaagggatacttttacttcttatcccacagtcccccagctcctctggcactggtatctcaaggtctatgcactccatccctgatatggaaaccttcagcatgccagccagccccagggacagagtggcccaactgcccactccgagtcagggacccagatgaagatctcagtttgtctcccccaaagggcacaagctgaaaggtggctgccacatggcctctgctactcaccatagggcaggactgatggcttccttctcccaagtttcactagtagtccacgtatgtatagtggaatgtgtgtgcgcatgggcttgtatgtaaatgtgtgtgatgggggtggatccattgggtagggagagaagctcctgagaatcccctgtgttccaagtacaggaaggatcacatggcctactgggagaaatgagtgtgaggtccgaggccccttcctcttagacctcacactacagggaagcccatccctggccatgctcaggcatgggctatggtgtgagatcagagacactgatattaggtagactttggggccagtggtgtcagccaggacagggcagagctaggactcaccagtgagttcatgtcccattctggccctgattagtctgtgagattctgctttcccatcccctcggctacttttggtcttccgtagtgccctcgctgtatgatatcatggtgcactttatttgcagtctgtactgcaggcaggcagaggagcttcaacaaattcagacttaacctggatgacctgacatcctcatgtttacatttccatgtgcgatgggactctgcatggccagcgctgtccggtcagagatgtggtttttgaagttgtcacatgttgtctcccaaaggtaaaagaaaatctgtacaccgaacacatcctggctgcctcctgtttctgttgggtgccataccttatcctgggtggggaagtgggtggagcataggacagcaagctccaagccaagagggaagtccagagctgagcagggaaactccttcagaacctccttccagatcacccttgacaggaccaccctctgctccctccacccccatgggccaaatgggtaacattggagctaggcccagaatgttctaattgatcaagaagtatagatcttctctttgcttctagagactaatgtttaaaaaaatgattaactgaagttgaactttgagggcaaaaggaaatgtaactggtcttctgcagaagctgct

SEQ ID NO: 35794 - DNA, 1134 bp, Mus musculus
tttgtttgttttttggagggggtatgatttttgtttacttgttattagacaattttatagatgacgaaaggacaactgtcatcgaggataaacatgtggtatattcatggccagtttgtaaataaatctatgcttttcagtgtggatgagaggccaggataggcatggctttggtttactcccactattgggatactaacttcctttcgttgactcagctagggatgaaagtcatttatgagaaaagagtgataattctgggtcacaatatattttaaagactcacacctgtattccccctagcactggggaggcagaggcagagagatctcttgaatttgaggccagcttgatctacagagtgagttccaggacagccagggatacacagagaaaccctatctgaaaataccaaaaaaagacaaaaagaaaaagtaaagaatgcgaaagcctttcagtgccttaggctaggtgtaggtctctctctttcttataccaacagaatagtaaattgaactcatgactttcctaaaactatctcctcactattcgtggccaaagttaaatctggtctcctagtctctgtggacagagagcctgatccttcccttcttgtaagacttgcaaagggtttctaaattttttagtttgatgcattaaaatgacttattttgagcatttactttggattcttttgaatacatataatggcaatatgtattcatatttctttctctcttttttcttttttttttttttgttggtttttcgagacagagtttttctgtatagctctggttgtcctggaactcacgctgtagaccaggtaggctggcctcaaactcagagatccacctgcctctgcctcccaatgctgggatgtgccactactgcccgacacaagcagtaatgttctttttttaatatttttcaagcagtatgtttttaaaaagaggaaatggggtgttcttttccatcattaataaatgggaactaatttcaaaccagggtgtcagcttgaagttgttcaatagacaagtctagctcattccatcctccaccctctgtctgacacatggtgagaatgcatgtcatcacttaggaactctagctgatcccgtaagagaaccagga

SEQ ID NO: 35795 - DNA, 1133 bp, Mus musculus
tgaagcatacaggttgacattaagccctgagcaccaaggatctatgaatgtgtattagtatattggtttctgcattcatactgggaagagggaagaaggtcttgtgttacattcctacgcttgatttgaatagtctcagacctctgtctgttctacggttttcatcaatgaaaatcagtcatttccttgaaactgaggagcacagagatgtacttgtgggatcaacatgatgtacccacttgtgggttaaaatggtagcccgcgtctggcctgccacaggcctacggccactcatggaggtggaggcgggaagtttgaccgtgtgcatctcacactgctgccatgcaggtgtcaggctgtgaaaagctgcagaaccctgctccaggggtgggggtgggggtgcagtctggggactccgcagactaccagagttggctcggggtcctggcctgcacggaggcccggatggcaggatctcattcttgggtaacacggccgccactggatgtcatggaagagctgagaacagggtgaggctcccgtggctggctctggcctggggcagaagtgaaaagagggagaggagagagctccatggggacaagagtgttgtaggcttgttcggttggcttggcttggtggaaactggctggaagtgctgagaggccttctgcggaagattagatgcagctctttagtggaagacctgctccattgcttcccacggcagatccgatgagaagaggcagtccatggttttaaggtgtttattgtcatggtggagagttgtgatgagtgaaaccgtaccccactttctcagggcgggcaaaagggttaagtaccttttgcagggaggagtgtctgggaaggggagctaaaagggtagtagaagcagagaaaggcatagagaggaggagagtagagaagtagggggaaagggaatgtggagagaaggagagcaagagggcaagagagaggcaggagtaaaggagtaaaagagtaagagaggatggggcaagcagcaccttttatagtgggccaaacctacctggctattgccaggtaattgtgcagagaaccatacttggctgttgccaggtaactgtgggggtggagtccagacagaacaccag

SEQ ID NO: 35796 - DNA, 3278 bp, Mus musculus
ttaatggtttctctccggactccactccctgatactgtctaacataagctgtcttgtttcatcatttctaggattctgtgtgcagtgagcaatttttgtgtcagaaattctatcataacatatatatttaacaagctcatcttgctgtaaaactactcatgttcttttgttgtaaaattttcactgattgtataatgtaagactagttgaaagtagaccaaaaagacaacttgtgacttcattatcttgcctgagtagaatagtattgattgaggaaaactgatcgtcattagccagtctcactcattataagtctgttggtttatgttgtactaaactagtgaattagtgaaagtaaaggaaatggctcattttatctaaaggcacatgtgcaaagaaactgggccaaatatgttctaaatatttggagttcatctatttgaattctcttagaaaattcaggtcatttaggaagttggttctcagcttctgactgagagctggcctggagcttcccatcttcactctgcggtgctgagggggaggatgacatgccattggatgcttttcagaaacagtagtttactctgacaacattggagtagctttttcagctagaaagctaagaagctcaacattactgtagagattattgcttcccacgagcatgaacacattacttgtgttaaactctataggtgtaaagggaatcactgcggattttgataggaaccccgcctgatgctttttggtttgtttcaggcagggtcttcatatcgagaagctcttttacttggtagcattttttgattaggaatgaacctcagcctttctgcccagtcatacagagcctcaaaggccaaggttattttgtcatttctttgttggttttggtttttgtttgtaaacaggattccgtataacctgagctagcctcaaatgtactatgtagccgaggatgatcctcatgcctccaccgtgtcagtgctaagattataggtgctgtcactacacctggttttttgagatcctgggcactgaacccagggcctcatgcatgctaggcaagcactataccagctgaactacatcccaggcccttgacattgaattatgattcttgagctctgttttgctaactaagtctatggagcattgactgttctctaatgagaacaaacttggaaatctgctgattacctacaataatttagacataggctaaaagtgtgaagtcaagccaggtgtggtggcatgtgcttgtaatcctagcacttacaaggctgaaacaggatcacaagtttagggcagaactgggctatcttaatgaacccctgtcttaaccccaacccccaaaaagcgaacccaaggactaatgcgatagctaaatcaaaatggcgtgcaggacgcatgctgtacatcaggcttttctgccatactcctcgactattacttgactgaagagcctcttgttttcttctccttggagactgttttcccttcttaatgtgttttcataacaatgttactgagaatctgcgtgttttgtacttccattctttaaaggatgtataattgccagatgtggctcatgcctataatactaacactcaggaggctaaggcaggaaagttttcacacaggttcaagaccagaattagatacacagtgagaccttatctttaaagaagttatacaaattttaaagggtacaattaagtaactttaaatatactcacaaaattatgcaaccacttgataaatctaggccatttcactcctctccaagaagccctgtattctttagtagtcacctctgatttcctcccagtttgtcccacgtaggtcctaggaaaccaatagtttattatatgcataatctgatcatttactataaatgagttaatgcaatatttagtcacttagtttcataaatatggtttcctacgtgggataaatgctcattctgagaactcagaacccagtacagtgacagaaagtgtctgggtttgtaaatctggtaggaagcttgcctagcacgtgcgagaccctaggctcactcacagtatcccaggaaaaaaaaaagctagttgataaatcaatggatttaaagagggaaagccagatacctggcagactctagagttaatcttattaaatagagtacttttcctcctagccaaacattcattctatactactgcttctaacttacattctagttcctcccagctctgctttggttttgccaagacagggtttctctgtgtagccctggctattctggaactcactttgtagaccaggctagactccaactcacagagatccacctgcctctgccttccaagtgttgggattaaaggcgtgcaccatcagtgcccagcccattctcgtttctacaatggatattaaaatgtcttcttgtcttctcagccaagaaaatcctgcttaaaaaaatgctaaaacatttggccgataactgacatggtaaatttatttagacgtgtccacctttggacagcttgcatacctcagaccaggtaaatagccccaggtttttaaatcgacttcattgaatttctgctatcttcttgaaatatggtactatacgactaagtcagatttgggtgtgttgtaacagtgctaagtgtgctcagtagaattttatttacagtactgtgtgatagtccattactgcctagggtagttgaaaaccagtgatctgagctagtgctaggtaaacctatagctgacatgatttcagtcacactcaaaaataggagacatgtacccagcaaagttctccagaatgcaggaacacacttcataaccagggaactagccaaatcctatgggctaatagctcagctgcagggaataaagattgtgaattggtggcaagtatgcacaataactccctaataattgcttcctaagcacttgtggcatacttttgagtgacataacagcattttcttggctgtacatgaccggtttccatgatgtattgaatactgttgtttgtgagccttgatgcctgtaacaccaataaacccattgttgaatatattttctctctttaaatgaccttgccttgtccaataaataagcgattgtctcaccttgtgtttggtagtgggtttttgttcatttgcttttactttcaatctcatttcttcattttctctgcccccagaaaaaaaaaggagctgattttatcatgttatatatgttgtatgatgatgtactttttctagtatgatgctgatttttaa

SEQ ID NO: 35797 - DNA, 3278 bp, Mus musculus; identical to SEQ ID NO: 35796

SEQ ID NO: 35798 - DNA, 1582 bp, Mus musculus
ctagcagggaggcattttaaccaggtgtcctcagatgatctccttttgggaatggttttctgaagagctcgccttactttactaccttgcatggcttggcttctttcattgcttaactgctctgaaaccttttcttgtttgtacttagaaccaggagcagttgaaagatgatgactctgatctcattctcaatgatggtgatatcagtctgacatatggggattctactgtgaacaccgagtccgcaacagccagcgccccaaggagatttatgggcaacagttctgaagatgccttggaccgggagcttacatttggggaccacgaactagtcattcgtggcacacgcctggttcttccgatggatgattctgaacctgcgttaaattcattagatgatacgagacacagtccggcctaagcgctctgatgctcagttagtggtttgtaaactttgcacatgtgattgtgaagaaatgtgtactacctacaagtcctagtgcatgtctctgaatgtgtaagctatataaatgccgtttatatggcataggaagaatataaataccctgtacaaggcagattgtgaaaaaactgttctcttaagtttttctggctttactacatattggccagatctgttttagaaacttactttcacagtgatgttctgtgttctgttacttttatgtttcagttaaagcataaaaagtgacggattgactctttcttatatttatctgagtaccgagttcttgtgctgtgagttaatttgtgtgtggcagggaaggggagggaagggggagctgttattccctcgggaacccgggaggagaggttcctttgttggaaaaacttttgttgattgctgctgcctttgtcgtgactttttctttcccttttctctggtggccctttgtggtgcaaggagctgatggcattttgatctcaccccattcaggttggggactgaagtgtgggggccgttttcccccattgatgtgaaagaacagatttcttgactacagtacattgatgctctgagaaagaaggctacaaatgacctccaagaccttatttcttttctttcacaccaagaccataggaattgcatccagctggcttagctaaaatacaggtgtatatcgttcagggcacttgttacagatttgagggcgctggagcaagtggacatggggatagtggtgttggaggtctctcttcccaaatatgtaaatagtctataccagataagttgaaataggaaatgtacttgctgcttcatttttgattatgttcattgtgtgtatagcaagccttgtcaccagaagttttttttatatcaacttaaatcgctgctctttagcagccaaacaggagcaaaatgtaaaatttttaaactcgttatgtttaaaggtcacttgttagttgatagttaatgttaaaagttaatttatgaacccacacctgttctgtactgcaccagaggcggccgtgagagggatgcagtgttctgcattctttgaagggattctcctggtgtaaagtgggtgcgcttgttgtcttcattgtcgtgttacttttt

SEQ ID NO: 35799 - DNA, 1411 bp, Mus musculus
ttttccactgaaaaatacccttccaaacaaagcacgcacttactctcaaaagggttctgtgccattgccaacactccttgagactttacaggaattctcatggtgtacccttcgtggcagccttgactgttggcatagccatttgttatgtagtggtagtgactttcctgctatgcaggaacaactcctgtgaagtgtacgttttatatgatgcgtggctcttcatgcagtaaataatttctttgttaatgtatgtttgaggggttttgaatgtcagcatcattgacccacaaagttattcaagttgtaaaagggtatacagtgatttaactactatcttttttattctgtcaggttactgagctcaccttatgaaaatggctataaatacttagcatgacaaattatatgtaacctgtctctttttagcatgcataagatttctcattaaggaaactgataacgcttgagtccactaaatctgccttcagtactttatcaaaggagaacgaagcttgttgtacttatgtattcatctggaagcctttttttccccctctcttgtctgtgtacagcatccccatgcatagagcaaagcatctctgttgagacagtcattagaattaagcacctcaatgaactttgatgaagtacagtgtgagttaccatcatgcatgagtgaacgcttgtggacctgtttttctgttgtttgtggaacctatgtgtttgattgacttgaacactgcatctctcagagttgtttttaaggtctcttggcatttatcctagtctgtgtttggcagcgtgctgttaaagtactagacttctaatctgtacgtgctttctgttttcccttggagtactgggaaagatgttctagtggtttcttttaggaaaatctgtcattaaaaaaattatagccttgcaaataaccattcactgttatttgagtcacagtttattctagagagacataaagaatgctgacttcatttatttttctacctatatacatactggaaaaggggaagggctggtgttgtaaaaagaaacatgacagaaaacttatgaggtggcagagttggggtgcttaggtataagggtggatgtatttgcttatggtcacaattgtaccatttaagaaatactggtcaaagccatcaagttccattacattgatttgtagcttgttagcacaatagcagaaaatgtcgtgaaaatagttgtattgtacagcaggcaggatggctgtgaactgggttaagtagaaaggcagttccaggtttgcctgtaaagtatgaccattaaatctttcatgttaaaggtatgtctctctttgtacatgagatgttttctgggttagagtttatattactcagggttctctagaggaatgaaacttacagaattt

SEQ ID NO: 35800 - DNA, 2387 bp, Mus musculus
ggcaggcatccgggtggagagaggacttgtccctcgtgggtggtggttctttatagaaaaaatcgaagcttagcagctcctcgaggcccggtaagtgtacaccctacaaacagcccaaggttgcctcctggtggccactttgatgtcatggccctgacttataaagacttgttatgctgggaggtcggtgttcgtcacagagctatagtggtggtggtatgggaacaggggttctttaaatcaaggaagccattagctgagctctggcatcttttcaggtccttgacagccatagaagggttgcggcggcgcgggggacagtggcggcgcgggggacaatgcgcggtcgagtagaggggagcagagagcccggcagacactgactgtgtgcctgtcggctctatgaacgggcaagttgtcattttatctctgactcctggcttcctcatcggtcttcattcagctgtctttctgttttcttgtgttttcccacagggtttggtaaaggctccagtgtggtggcctatgaaggacaatcctggcacgactactgcttccactgcaaaaaatgctccgtgaatctggccaacaagcgctttgtatttcataatgagcaggtgtattgccctgactgtgccaaaaagctgtaacttgacaggggctcctgtcctgtaaaatggcattggaaccattctttgtgtcctttgctccctccctccctctgtaccatccatagggcaagagtgggctttcacctctttaaagttgctctttccgtcttttctcccattttacagtattaatcaacgaaggacacacagtgatcatattaagatttagcaaagagcaaccttgcagcaaaaataatttctctgttgctgcactggaaaaacaaaaccttagactgactcttctgcatgtttctcatagagcagaaaagtgctaaccatgtagccacttcacgatgtaaacgagaagcataggcgataaagctcccactgagacacctttggggctcagtctggatgcgctgtgcggtcacgtgactgcggtgtaagagttgcagcggctgctccaactcccttctcgccttctctgggcagttaagaacttgccagaatgcatggtttaacttccttatcaaaactctgaccttccttctgttcttttgtgctttcacacgactaacacagatttccagagaattaacattttgaactttgttgtaattctcaagtgacttttcccccatactaacatttgactcccttacgtggcgtgttctctgagcgttcctactttaaagcatggaacacacaggtgatttgaagcatctaagcagatctgagaaaacgagcctgtttcagaacaaactcaccacagtgactacttcggaagcttaacaagactaactctcctgtcctttttaatttttttttttaaattttgttttaatgagtagtaaaatagtttatgggtttggaaacttgcatgacaatatttgagcctcctcaaacgttcctgcagttttgagattcatcctgtagacatgacaaaaactctagagccgcagctgagcaggcacagggctgtcatcaaagtagggacaaggtgaagtccttgtaacataaccgttgtctgctctttgtctgcatccaggaagagtgcaaagtccctttgcttgtgattcttagaactttccctccagaattgcagttagactctggggctgtcggaggtggtcgtcatccttcacaggcaggactgggttttcacccccttctctgaaacgcaggattgcctccttaactgtactctccattttattacatatataacgagccaatatcaaagtaaagatgtaatgaaaacacacactcatatattactgtaggagtggttatagatgccaacacctcatttccatatttgtcattagctgtttccatctactgtttgattgtatccttacaaaaataaagcagcatagaaagagcacgcctcctgtctttttattctgcccaaggaagcatgagaatgtaatagactgctactccagaaacttggggaccttgctcctgacttcaaggaaatagttaactgcaatgtacaaagctgtaggaccactctggtccagttttcaaaacaaaaaccgcttcagggtgtttcctggattttcatgtcctacaaaaggcaagaacttacaattcttgcttgagcaggatgggtaggaagggaatcccaaatagggccgcttgaggaggcattatgattcttcttccctctattccgttcccattggctctctggagcccaggactcctgtgttgtatcatcaccccgtcctccctaccttgacctggcttgtgctttgagcccaagtctta

SEQ ID NO: 35801 - DNA, 1151 bp, Mus musculus
ctttaatgccagcacttgggaggcagaggcaggtggatcactgagtttgaggccagcctggtctacagagtgagttccaggacagccagagatacacagagaaaccctgtctcggaaaaccaaaaaaaaaaaaaaaaaaaggttacagtgtaaatggaaatatatcaggataaaagggaaaaggcaagtatctggtgggactacataaaaagtaatagaaacatgctgtttttgttggatagcagcaattttcttcctagttcatacttttatcttttcatttttggttttggggccgtctttctctatagccctggcttccctcaaacttgctatgtagactagactggcattgaactcacagagatcaatctgcttttgccttctagttctttcgtgtcatgaggttaaatgttcctagttgaaagcaagcttcatatgtaaggcggatgtcgtgattccatgaagctggaagtggcaaaactccatgcagaataggcttctttatgcttgcatagcaaaggtcaggcacagtcatttggttttctatttcattgtaggagagtaaagctactgagtggtcctcggaaggggattatgatttggacagtaccgccgagaccagccttcagtggattaggtaagcactttaagaaatatgctcaaagtagcttgaggcttgataactgtctgtgatttttagctggggataggacacactggagattgagcctgggatcttgtacacacagggcaggggctctactacttggttgtctcctcctctaaataccctttagttcttattgcttcgggactgtctcatgtaccccagctttgccttgaagttgctgtatagccaagggtacttttaaattctggatcctcctgtttgtttcccccagggttaagatacttactttgaagttaagatattttatcactactggtgatactgagtgatatttcttttgggccagtttcccctctcattctcctcttcagcttctaaacatatctgatgaaaagaaaatatgttttacatatactatttatgctgaagggaaaggagccagtgatgtcatacatactgtctctccttgtggacagcatcatgtagacaacatggagggtggtggtgggcatgatat

SEQ ID NO: 35802 - DNA, 1165 bp, Mus musculus
aagataaattcttaggtaaattggagataagttttaaacatgcctatttaatatttatatagtcacaagtaaatcttgtcaaataagtcctttgaaatgtattcagaaaggcaaattctcagcattgcagatgtagatcagttgatagagtacttggctaccatgaggaagtcctgggatcaatccctggcaaaaatgggctttggtggcatgtgcctgtgtataaacacaccccccaattgtattgtctgttactttttatgcttttatgtaactactaaaatcttaaaaattatatatgtaaataaggtactacacttctgtttacattataattttattgcatgaggtaatctagttttaactcccaagacatgcatgttctgttcaaattcaagattttggactgtattgcaattatgactgtgaactgatttgtttcattcactcttatttttatttttaaacagtttgagtttccagtttatgcaccaaaacatgagcatgggagtccccaaaggactttctttccaaaatcaactattaccattatacttggtagtcttttaccctttggctgtatttttctgcaactttcttatattctaaaccgtatttggtgagtattgcatctcaataaactcaagtttagtttaatacctaacaatagtgcatatttatagggtaatggaataatacttcagtacttgtatgtaatgtgcaaaaataaaatcaacgaagatggatagtgtgtaccaaaataaaatgaagagtaagttctaatgttcaaaagcctgtcagtttcctgtaagtctagctcagtggatataagtctcttttggtctgaatgcatgcatgcacatggacatgtgcacacatgtgcgcgtgcacacacacaatctattttaaaagtttagctttaaaaaggaattaaaatgcagttgctgtattgttttttataatacctttatatcatactctttcaaacaaatctgtcctggtgtctgtaggtgtttgctacgaggcctggctcaaacaaatctttttttttttttttttttttttattagggatttagctcatttacatttccaatgctataccaaaagtcccccttacccacccacccccactcccctacccacccactccccccctttggccc

SEQ ID NO: 35803 - DNA, 1145 bp, Mus musculus
ccctggacttcctcccaattttaacgaatggtacgtctgaggacaaccaaaatgcatttaaaaaagaaaactgagacaaatcagatggaaatggagttttaaagcaagaggccatatatatagggctacatcttggtaactgcaattgttcaggaaggtttggggcaagatccaaaagtagctatgcccttttctcaggattagaaaatatgttttggcatttgaaggaattttttacaaaatcttttcactgcttttcctgcccccctcctcttgctctctgtacaccccgttctggaactccttcaaatcattttaattaacactgtcctgtttcttgaggaagttatcgatggcttggtggtggtgatgttaaactgatgaaaagtcttcttcgccttagtggtgattgtttcttaaaccatgccaaagtcctgttatgtcttgaacttttcttcaaagcattacacttgtgaatgtatcttcgtctaatggggtcgaaacttgttgttcagtattttttcaggctgaggatatgatgttactctacacagattgtaacgtttagtatacagttgccttttgtaataacttttctttttgtaaatacatatccgttgatgccatatttatcgtttgtaatttaattattgctgcaagtgccgggaactgaacaatatttatggataaatgttttctaacaaattctgtacagcttttgattataactgcttttagcattaaacaattattgttttgagaaaaggaacacaatttacaatttttgaaccatactgactttttgttttgttttgtaacagcctcctacaaataggagatgtgagtaaattgaattttgtttgttggtatttataactcactcagatcccttttttaattgttaaattatttttctattgcagtctagattccttacaatgtcagtttccatctggggaggaccctcctgtctttatctctagctcagatggttgtttaactgggagtttaaatgtgtttgtcctggattttcggcatgcaaatcaaataatactgatcaattcacttagtggccatgacatctcaatcttgtacttcaaagactgagaggctgggtttaatcattcctgccctatatatatata

SEQ ID NO: 35804 - DNA, 1133 bp, Mus musculus
taacaaagcaaaacaacaaaacaaagttaactgcttaaatgttttgtaggggcaaacaaattctgtgaactgtgctgttttcttggcttcgtgttttctatctctgcttgattcaaatgtactctttactttcatatagtgcaactttatgatttttgaaaattaatggttctattgactctgtcacttaatccatattaaccaaaggcagggttgaatctgaattggcatctgaggttcaaggtaaccgtgttcttatgggttttcctctctcgcaccctctcctttccaccctccctctttctctctctctctctctctttctctctctctctctctctttctctctctctctctctctctctctctctctctctctctctctctctctctctctccttttttgttgtcaattagaactgtagcattctggtcaagttcttgtgctgtactttgtgcgtagaaattgagttgtatcgtcaatcccagtcagtaagataagttgaaacaagattatcctcaagtgtagatttctcttaattccattcgtgtatcatgttaatctattgtggcttcttgtgtaaagacaggaactgtggaacagtggcattgtctttcgtgttgttcaaataagaagtgtctcacctgtacatgtacaagtcctcctgtcattggatttggcacgtgaacattgtgaacaaggcaatgttaagaatggttccccctaaacaacatatattatacctgctactggaaaagtgtttaagacttagctaggtttccatttagatcttcatatctgttgcatggaagaaagttggaatcttggcatagagttgcatgatatgtaagattttgtgcattaataattgttaaaacctgtgttccaaaagtggacatagcatgtacaggcagttttctgccctgtgcacaaaaagttaaaaaaaaagttgtttaatatttgttgttgtatacccaaatacgcaccgaataaactctttatattcattcaaagaaaaggaaaacttcaatgtgtgtttattatccattatgtgctatcaactatattagaaactggacttaatactaaagttcatgtataaggccactgacttcagacaagctccagtgtc

SEQ ID NO: 35805 - DNA, 1484 bp, Mus musculus
ccagttgtggtggtgtgtgctgtaacaccagcgctgggaaggctgaagcaagagaatagagagtttgaggccactgggctgtagagctagttccaggccatacatatatatgtacatacatatatgcatacacacacacacacacacatacacacacacacaccccaaactgaccatagaaataatggattacatttctattgcagagacacatgtcggaggtgacattctagttgtaaagaagccacagtgtcatctggcaagttgctctgcctgcctgcttctcagcccatgtggaaaaaaaaaaacacccctcaaaggaatttcagcccaaatgatgggatttccgcgccccccccccaggttaatatatttaaacatgcacaaaaccaacggcatatacttctttctttcactttttattccttaaattgcatacgtgtgtaagtcattgtgccggataaaatcaatctcatctcagaatatttttgacttgaaaattgtttcttctctgtctactttgcaaccaaatgcaatcagtgtgccttgaattatttagcttattattaattaagttaaactagggctgtagaatagttaaggccaagtgaagcacaacgctatgatttaaagcgctttttagacccagcgctcctttaacccatgcaagacaatggtggagttcagaagtcctgggggtgggggtccttagtaaattctattcagggctattgccttttctatgtgccaagatgaacttttcctgagagtagtttacaaattgcatttaaaatgtaatattttcatgcttgtttctttttctggatttatgcttataattcatgtagcaaattagttgtgctctattatcttctgtacatttcatgctgtaatcattttttttccaaataaaaatgaaaacttcaggttccacaaattgatactctggtgttcgtgtatttgtttcccttcacaaaccaatctcgtttatttgctcctgcagaggttagatgctaaagctatcacatttgctattgaaatttgctattgagctaattcttcctgttccagtaagcaggtatctaggcaaattaggtcaccatcaagcttgtaatatgttttttttttattacaactttatagtctgagtgaaataaggacctaacagatcgaaggtttcagaatcacctctaaggaagattccccatgaagttcttagagtaaatggtatttatttatttatttatttatttatttatttatttatttatttatttttttattcaatgttcgtggtgacttccagctggtgcgcacgagtagtgagtcaacatttctgcagtgtctgggccatacagtctccagcagcagcgatcacagggatgcctttcgttttcattgctactgcagggcttccagagcccagcgaaaaaactggctaactttggctgagtaaaacagtctgtgaaacactcaggctgtac

SEQ ID NO: 35806 - DNA, 1119 bp, Mus musculus
ggtcttcctgtggagttctcatctacttcaaggccttcaatccttaccccaactctttcttaagtgtccccaacatccatctatagtttgtctgtcggtatctgcttctgtttcagtcagctgctgggtggagcctcttagaagacatttatgctattctccagtctgcaagcataacagagtatcattaataatgtcaggaactggtacttgcttgtgggatgggtttcgagttggattggttattagttggccttttcttcagtatctgctccatcactgcacttcttttagatggaacaaattttgggtggagagttttgtggggggatttgtgttcctatccttccactgggggttctgctggctacagaaggttgtttctccaggttccatgtcaccactggtaggtatcttggctaaggtctcttacattgactcgtggaagcctcacctaccttacttcctagagattctcctctcactgcacccctgggagctgcagattctcttgaccctctggcactctctgctgtctttccccatacctgatccagcctccatgttcctctctacttacccattttacctagttctctccctccctctgcctcgtatgacaatgttgtttccacttctaattgtgattcaagcatcattgcttgtggctttcttctcatttaacttctttgggtctttggggattatcatgtgtattttgtactttacggctaatatctacctatcagtgagtacttaccatgtctgtacttgtgggcatgggttacctcgctcaggatgatattttctagttttgtccaattacctgtaaaatccactatgtctttgtttttaatagctgagtagtactccattgtgtaaatgtaccacattttctgtatccattcttcagttgagggacatttgggttgtttccagcatttggctattcggaagaaagccactatgaacatagtggagcacgtgtccttggagtatggtggaacaaattttgcgtttaggtagaactattttcaattttctgaaaaacaagcagattgagttccagagtggttgtccactttttcagtcccatcaccaatagaggagtgttctcct

SEQ ID NO: 35807 - DNA, 1132 bp, Mus musculus
tatttcataacagtaattttttcaactattataaattacattgtaaatatatgtgttttccaatggtcttaggcaactcgtgtaatagtgtcatttggccccaaagtggtcatgacccacgggttaaaaactactactttaaagtatacaattcagtagtttaactatattcatcaggttgtatggttatcaacacaatttaagatcacttttaccattaaaaattcccatcttgaggtcagtcatgatggcacacacttgtcattgtagcactgacaggcctgaggaagacgggtcttgagtttgagtcatgcctgggctacagagtgacatcctgcctttgaaaacaaatacagaaaagcaagcaactaatggaacaagccaaaaataaaaaataaaaaataaaaaagagagatttacaggaccttgtaccttttaatagtcacctcttatgctgatttccccaatacattcaattaacgtttagccagtactctgatttctgtgtttgtagctttgcctattctgagtatttcataaaacaaaaacttaaactatatgatatttttatgtggcttcttttagttaatacagtggttctctgttgtggtaaatctccaactcatataagcccgggcaatgaaaacacgactcaattaatatgattatatgctgtgtgcctagattgggcagatctaccgctacactaccatcttccccatataagagaccccttagaactgtggtcttttcaggccatgtgcttctgttccactttccttcttcctcctcctccatagtcctctctccctctctctttctctccccaaaccttcagctccaccttcccctcattccccacccaatcaccggctctagcctttatttataaattaaagtgggaagcaggtttacagtaaatcacctgagtgctgattcattccttggtgtcagcccctcacagcagaacagaattaacatcaaatatattaaccccagggctatctgcatcagttctcactcttctgaatgctgagaccctttaatacaggtcttcatgttgtggtgatccccagccatacaaatattttattgatactttataactgtcattttgctattgttataaatt

SEQ ID NO: 35808 - DNA, 1130 bp, Mus musculus
ctggcgtgttgaggccagaaatcaacctttagtgttattccttgggtggaattcaccttggttttttgagacagggtctctccttagcttggaacaagataagttgggtaggctaactggccactaggtatcagagatctgcccagtgttgggattataagtgtataagtgctgtaagccaccatgcgtatctttgttgttttgtttgtttgctttggccttttcaagacagggtgtcttagttagggttttactgctgtgaacagacaccatgaccaaggcttctcgtataatgtcaacatttcattgaggctggctacaggttcagaggtttagtccattatcatcaaggtaggagcatggcagtgtcgaggcaggcatggctcaggaggagctgagagttacacatcttcatctgactgcagccaggagaaaaatgactcttctgcactgggcagagcttcaaagctcactcccataatgagacacttcctccaaaaggccaaacctctcaacagtaccactccctatgggacaaacatgttcaaaccaccacacaaggtatcaatatgtagtcctggctgtctggactcgacttgtagatcaaacatgctttgaactaacaagagatccaccttcctctacctccagagtgctgagattaaaggcatgtaccaccaccaccctatgtatctttgtttttaaatatttttttgtctttttaaaaaatattttttatgggctggagagatggctcagcggttaagagcactgactgctcttctggaggtcctgagttcaaatcccagcaaccacatggtggctcacaaccatctgtaatgagatctcatgtccttttctggtgtgtctgaagacagctacagtgttcttagattataataataaataaatctttaaaaatatttttataactttatttattaattggatattttatttatttacatttaaaatgttatcccctttcccagcttctcttctgtaaaccccctataccatcccctcttaccctgtttctgtgagggtgctcccctatgcaccaacttactcctgcctccccgccctagcatccctctacactggggcatcaagccttcacaggaccaagc

SEQ ID NO: 35809 - DNA, 1124 bp, Mus musculus
acataactctaagaggcactgcagtatagtacagtagtacaaactgtaattttaatgccagactctgactaattgatggtatagtctttggtatattctctgaacttcagacattaaataactggggataataggacatatgaagttagtataaaaaagaaataacatttataatgctcctgagtttcctatgtctggcatatagtgatgctctaagttgtttctactatcattgctgtagactagaaagtggcttttgttgatgtaaacagaagtatacaaaataaatcccagttagtactttatatctgcacccttagggaactcaaaacatttattttactagtatacatccaagtaatttttagaaaatgtagcactgtatattaatttatcttcaaagataggattgacattaatttaatatccatgtatttgagaaagtactgtacctacatagacatgattgaacttttattttcattatttcaggttgaagccgttgaggatagccaagagaagaattctgatcagtctcccaaattggacaatagcttggatattttaaagaagtattctttcctttttaatctacattcatatatgtatctcaccacaggaggctctggttcagtgtacaaggctcatgtgattagagttttcagtttgcaaaatacggtcctagtgagtgcattaaaagagtactagtgagtgtcacaagtcctgtatttagacgtgagcagctgtgatctttcttatgcgtcttgagaatttttctttggtaatattgtgtattgtaaggcaactgctctgctactcagctacatacagtccctcttatgatttctgtacctttcattttcagattgttttatttttgtgtttcccagtttaaatcatatatgtttgtgtgtgtgtgtgtgtgtgtgtgtatacacacacacatatatatgcacatatattaatcacatagatatataggtataggtctatgtgtaggaattgattttatacacacacacatacacacactctatatgagtgttttgccttcatgtctgtgcatcatgtccatgcttagtgcccagggaggcagaagtggcggtcaaagttcctgaacctgc

SEQ ID NO: 35810 - DNA, 2174 bp, Mus musculus
agagaaagcatgaaggaacaactacaaaagatattaactcaggatactcaatatgaaacaaagaccactctcatgtgtagggttcacaataaatgttcattaaagtaccaaataactctcttaaccatttacagttattgtaagtagccattatggcccaagtgagaattagatgaaagtttaaagtaagcatacttagcattctggatttagatagactaatgtaactacaaaatgggtgctcttttaacccgctgactttgtgaatggatttcaataatagtataaagtagaaggcatgcaatggggatgagcaggtttggctaaccagtgtttccttccgcctggcagaagtcgtagactgcttgtctcacctctctcattcctgctcaatgattatcttttttcccacacacaaaaggaatacttgaaaatacaagactaaatgatattactgcatcagacaaaatacatcatcatcttttcagtcataggctaattgtcttggtctaatatcctttccaaaaagtaccttgcatacttgtgtgatactgttaattctgggtattattgtagaaacaagggtggaaaggttatttggtgtgttttcttctgaattacacaccacttatgtatttaagactactaaacttgaaaatacaatatttcagtctcttggtagtagcccctcaaaacagttaagtagaaagatttccatccaatgttagttttgctgggtaacgtggtaaggtgtgttaaatatttacataaaaatgaatgccattcttaacactggcattttataattctatgtggcaaagatgggaagaatagcctattttcaactactaacggtttttatttgaaagagagtgtttttgtgcatatttacagcactttttttttaaaaaaagttaccaatttggaaagaggagatctattccaaagccctgtagagccacaactctttggacatgaatgttggttcctatagctaagtgggccaaggaaatggtctatttctaaattatgtgatggaccttggtaagatcctcaaactgctggaccagaaagaggttttagcccctaatacgttctcttaaaacatgaaagaagtatgaaatgtctttacttgaaagaaggaccacgtttgacagataggctaaaatgatatttagaaaatatttttctatcagtttccatttttttgtctgacatgcctgtactatttaatgtttatattgtactttgatttaagaacatactagactcattgtcttccagtatatttatatgtccatatggcacattttgattcttccatgtatttgtgtggatgtttatttgggtgtattttttcttaaattctaaaaaggccataatttcagttatcagaaattattccataattacttaatttaatttgttctcatctatcagtattacttttgagtattttgttaggtgtcaatcacagcttaagtgtgtgctcttgtagcctgtatttgaggaaatctgctgaaagcaaagtctttctattctttgcctattccaaagagctaaaacatctaacccaggaaagctttgctgctttgttattgttgtcattgttgttgctgctgtattattattttacatcagaactgtaaggactgtgaataaatataagagccaagtagagaggcttagttaatgcagaatgattgaggagatgataaaatcaaaatatttaaggtagtagaaataaaactgattatgtatgacttgttgcagcagaaagaaatctagatgaacaaatgagaatttagagtcatgcctcagttaaccattacattgtacactgcacttcaaatcagaggaacctgggtttgctttttgaaaaatttttattagtgatctaaaacatggctagcatgggcttagcagatgaagttatttgaaatgagccatccgatattcctagcactatattttaactattcttatttcagaagagggcaagaaatctaacagtaggtccatattgccataattttaataataatttttgagctatcaaaatgtctatgtaattttccaaattgttgtctattgtttgaaggtgttgcctattaaacaaaaaatatccattccatatctactacatatacaccagcaacagtataaatgtaagc

SEQ ID NO: 35811 - DNA, 1162 bp, Mus musculus
gaagaatgtaagctctctgactgaagttcccagagaatgcattttggaaaatatagcatcattttaataataaatggtaataatcttgtaatacttacagtgtcatagatggccatggattcagagggtggtactcctgaaaaatatattagtgaaaataaaatttttatgctattataagaaaaactcctagtgtcctggttgttgggacgagactttctctgatgcctctgtggcatattgccacttgagctggtctcagaactctagagatgactgtaaaggagcatggacatttcacactgttttagctcagcatctcctgtcctccctcacctaccactaacagttgctagctctgctttgttttattgttttgaacactcttttcatgtcatgctttcaactgctttctgtatgttcatatttctttttttctctttataaagtctccaaatacctaatctattagcccctaaaatttctacttcctatactacttttatctctggtggctaaatacacatttttgaacacaacaaaatgtgaatatagttgcagactcaaagtagataggcttgcatactaaacttaagtgtggacacagtatcatgttcatcttgtagcccacataacagaagatggaatcagatttttctctcagaatctgaaatagttctctagttatatcacttagtaacttgcatgctgacaacatgtctctaacttcttcatttaaagtaaaatataaatgggaagtgtggttatttcaaaacacaaaagtggaagtatttgtagtaaaggttcagttattaagctctgttggatatggacatcgcttgagctgctttctttttcctatacctattttctttagtggaacaaaaaaagatagggccattcttctgtttgggtgagtggatgtttgtttttgtttctgtttttgagacagtgaaattcacagtgatcatcctgccccagccccctaagtgctaggactacagtgtgtaccaccatagctgactatttaacatggctaatctttcttagtagagttgttgagttcatcctgacccatagttagcctcccaacttctgtcttgcatgggcaatgccaaagccaactctgaaaattatgtcattatttcagacatgggaaaag

SEQ ID NO: 35812 - DNA, 1229 bp, Mus musculus
cccctcccccgcctctgcgttttagcggaaacccggcgccccgggtggcctgggtggggaggcaggtggggctctcgggcgtcccacccctgccccgggacatttcagctgaggttccccgaggctctgaggaactctgcctccagcctggggaatcgcctcggagtgacagacgcgcggaactcggggcggggggctccccggggcggggggctcagtttcccaattagtggaagatggcgttgaattatcggggaggaagctttcttttgtttcctctgccacgagcacgtggaggtaaacctagacctgtcactgtggcccaaaagaagagctagggggctgagagaagcggaggctaaaccagggctcagcctcgcccgggccatggccgatgaccagagactgggcaaactttgaggactcagcctccaagctcaccttgagggtgacagaaagagcgagggctgtgggcacgatgggctggggccagcagcgacggcgggagcctgttccagctttacagaccctggggctcaagcctcgcagagcagcaccctctgctccaggcttggaatccacccggcagctgaactcctccgaccaccttctccacgcctctaaagccccccagaaaagggaattgtatttctgtggggagtgtggcacgggattgggagggagcgatttctggctgctattgactttttggattaacctgtttactcagagggtatgttaagaactgagtaaagtagagcagtttacttaaaggatgtttgtagcaactcccctaatttccagaagaggtgtcagggaataggattttatttctgccacggatattaaagaaagccatcatcctaaaatttttatttttttccctgtagttaagggggagaatgcagaatgcttccccattccgtcttaggatagacttaaggacttgacaatttggtaactttgtggagtcatttctaattaaatcattgctgacatatttttcataggtcagaacaatttgctgtcatttcccaccccccatatctgaaactttcacaaatgtcccctgcttaatcacacttaaggcatccccttttaggatatcagtatactaatactttttaggttttgccagatgtctgtttcactcagaaacatgcaaagggaggtggaggtaattattacctgtggcactgagcaggaaacggtgtgtacatgcaggatct

SEQ ID NO: 35813 - DNA, 1896 bp, Mus musculus
tgggttgaggttcatggaaaactctattctccaagtcagatgggagcatttgtgttgatgaagatgaaagagactgcagaaaattacttgggccacacagaaaaaaaaaaatgctgtaatcacagtctctgcttatttcaatgattcacagtgacaggccactaaggatgctggtcagatatctgagctaaatgtgctttgagtaatcaatgagcctacagctgctgctctagcttaaggtctggacaaatctgaagataaagtcattgctgtgtatgatttaggtggtggaacctttgacatttctaccctggagattgagaaaggagtgtttgaggtgaaatctaccaatggggaccctttcttaggaggggaagactttgaccaagctttgttacagcacactgtcaaggagttcaagagagagacacggatggatttgaccaaagacaacatggcacttcagacggtttgggaagctgctgagaaggcgaaatgtgaactttcctcatctgtgcaaactgacatcaacttgccataccaaaccaaggatgcttctggacaaaagcatttgaatatgaagctgactcgagctcagtttgaaggccttgtcacagatctaatcaagggaactattgctccgtgtcagaaagctatgcaggatgcagaagtcagcaagagtgacatagaagtgattctggttggtggcatgacaaggacacccaaggttcagcagactgtacaagatctttttggcagagccccgagtaaagctgttaatcctgatgaggctgtagccatcggacctcccattcagggaggtgttttggctgatgatgttacagatgtgctactcctggatgtcactcccctctctctgggtattgagactctgggaggtgtctttaccaaacttacttacaggaacaccagtattcctaccaaaaagagccaggtgttttttactgctgctgatggacaaactcaagtagaggttaaagtgtgtcagggagaacgagagatggctgaagacaacaaacttctaggacagttcactttgattggaattcccccagcccctcgtggagtgctccagactgaagttacatttgacattgatgccaatgggattgtgcacgtttcttccaaagataacggaactggtcgtgagcaacagattgtaatccagtcttctggtggattaagcaaagatgatattgaaaatatagtttaaaatgcagagaaatatgctgaggaggcagttaatatggctgaaggaattattcatgacacagaaaccaagatggaagaatttaaggaccggttgactgctgatgagtgcaacaagctaaaggaagagatttccaaaatgagagaactcctttctcgaaaggacagtgaaactggaaaaacattaggcaggtaggatcttcccttcagcaaactcttcgaaatggcgtataaaaaggtggcatctgaacgggaaggttctggaagttctggcactgtggaacagaaggaagatcagaaggaagagaaacagtaatcgtggcagtgcattgtgaagccagaaggacatactatgaaacatgggagtaaagggacttcctgagcagaaaaggggcagacttcagtctttttactgtatttttgcagtattctatatataatttccttcatatataaatttagtgacaattgctaactcatttaatgggtaataaagtcagcaatagcaggttcatactgttctgtcactagcctgttattttcagctgcatgtaaaagggtgggatggggctgtgcaccaatcattaaggtagatttggtttgtgctgaaatggctgtgatttcaaggtgggaagcccatttcatatgcagtggaggtagtctgtc

SEQ ID NO: 35814 - DNA, 1114 bp, Mus musculus
gaacttactttagtctatcatgtaaagatatcagtgcttacctttcctacctcaacagatgggaaaggaataaaatatggcaatatgaaggctagggctttgggaaagcaaaaaacctgaaataaatatgaagcgtaattattctctgtgcttttgccttattgcctacaatgacatttctaaacccattaaaagcaagaataaagtctatgccttaccttttgggaacttaagaatgtgaatctttcagctccaatgagcttttgcagagagagaggggccagctttgtgcctctggcagcttctttattaggccttagcagctgggtttttttttctttcatattattataatttcattttgtctaatttctggagagtgctttgcctcccttctattgagaacagtggctcttggttgttgtcagaattcttacatagtgagaagcaaagtccccaagcaggcttgagcagagtcctttttcttgtgtgggcaaaggcactaaggacgagtaattgacaggggtggcgagaggctttgcaaactgaggacaagtgtacaattcatggtacacaggctgacctcctcacctgggcagcgtctgaggacacctgcctgggatcattaaggcttcttgcccaattgacatagtgtgactgcctccgctcatggagatgaacaaagccaagcatttactgactggagtgcagagatgaatacaatttgcctcttcggccaggccaggcacagacagctgctcatgcagaggggtttcaaataaacgtgtttctatttagaatgtgtatgttttgattgaatttgaagaaaagcatgaggtggctccccctcggaaaacaaattaattatgtactcctgtgtgtctgatggttggaagccagacatggctacaacagcacttcatggaaagaattttcttccctgatgaacgtgagactcttctgtaggacaacagctggtgtttttgcaaagtcacatggctgctgcctccaaaagggtctttgagggaaacttagaacaatataagtaatcttttctatttgatgcagctaccccatgattttgttgttttcctcactttggatggtgtattca

SEQ ID NO: 35815 - DNA, 1199 bp, Mus musculus
cttgaagtgttactccctatacttttaagaatctcttgaagaatgacactgttgcaagaattttaatctttcattatttattatgattataattaacatgaatactaatcatatattttataaacacagactgaacatttattttgtatcaggcaggtctgggcactagacataagcaccactgaacaatttcaggattttattctgcttagaaaaatgtcatctcaatatttgtggcacatatacaaaatcccatgtgttctatatcatttattcttctcaatgttttgtagatataaataatcatgaacttatttggtgatatggtataaaagaggacaaaacacagtgcgatcagatcgatctaagatggcgactgtggaaccggaaaccacccctaccactaatcccccacctgcagaagaggaaaaaacagagtctaatcaggaggttgctaacccagagcactatattaaacaccctctacagaacaggtgggcactctggttttttaaaaatgataaaagcaaaactaggcaagcaaaccttcgattgatctctaagtttgatactgttgaagacttttgggctctatacaaccatatccagttgtctagtaatttaatgcctggctgtgactactcacttttaaaggatggtattgagcctatgtgggaagatgagaaaaacaaacgaggaggacggtggctgatcacactgaacaagcagcagagacggagtgacctcgatcgcttctggctagacactgctgtgccttattggagaatctttcgatgactacagtgatgatgtgtgtggagctgttgttaatgttagagctaaaggtgatgagatagcaatatggactactgagtgtgaaaacagagatgcagtcacacacatagggagggtatacaaggaaaggttaggacttccttcgaagatagtggttggttatcagtcccacgcagacacagctacaaagagcggctccaccactaaaaataggtttgttgtttaagaagacaccttctgagtattctcacaggagactgcgtcatgcaatcgagattgggagctgaaccaaagcctcatcaaagcagagtggactgcactgaagttgattccatccaagtgttgccaagatataagagaagtctcattcgcctttgtcttgtacttctgtgttcattctcctc

SEQ ID NO: 35816 - DNA, 1176 bp, Mus musculus
ccacatttcagaaaaatttagatgacgataataaccacagtgaagaagaggaaaatccaggcattatccagtcttcaaaagatacaccatctttgttgaatagcctactaaaggaaaaaaaaaacaaaaacaactgatttggtatatgctatgatcttcaagtatcaagtgaaggaaccaatcacaaaggtagaaatattagagattgtcagcaaagaatacaagaaacaatttcacatgatctttatggatgcctctaagtgcctgcacatgttttttggcattgatataaaggaagactgtgctataagcaactcctatacacttgtcagttcattgaacctcacctatgaagaaaagctgagtggagagcagcgaatgcctagaaatggcttcctcattgttattcttggctttatattcatagaaggaaactgtgcttctgaagaaagtgttgggaattcctgaatatgatggggagaatcatcccatctacggtgagcccagagcatttctgaccagagatttggtgcaagaaaattatttggcatgtcaataggtgtctaagagtcatcctccacacttgaggttttacggggtctgagagctcatgctgaaatgaccaagatgaaagttctagaaattttggcaagaatcaatgagcgtaacccactgtttttcttatttttatatgaaggggctttaagagaagaggaagagaaggcctgagtcagaagtatttctccaagtagaagcccagtcacaatgatgacagagcatgagcttccagcttgtacccagagtgatgcatttgttttggaatgtgttcattctgagtttgaaaaaagcaataaaaattctaagtaatggaaggtcgaaattagcttgagtagaaaacagtggaatgcaacactatcatatatgctgtttgggaggtaactatttttgcatttgggatagattatcaaatgatattccttttagtaaaaaatactatctttataatctgtttatgaaaaaagctttaatcacaaatttattgctgtttgttatatatttagaaaaagaaaacaaattatgcgatgttttattttttaaatcaatgtaatcctctattctgtaaaaataaatgctgtgtttcaatatttgtgtggcttactaaaaattaaaccagta

SEQ ID NO: 35817 - DNA, 1099 bp, Mus musculus
gctaggccttatcctaagctcctttcaggggcttacctcaagaagtccctgttcaaggtactgtaatggcctaggtcagcaccagagtgggttcttctttcttgttgcttcatcttgaggcagaggagggggaagaggttcagtgaacctgtcacagattatataataatctgaagcaggacatctcaatacgattacctgttagttattagcttgtgaaagacctccatttccagggagaccctcgctcaagtcccaggatgagccaataacccagtaactcgagagaaaccattcttgatgcaatatcgcatgaggtttattcgggaatcagcatgctgaggctgagctcataaggggcagcggagatcaaccctcagcagttgcaatcaactgcaaattgaggggaggataagtccacaaaaatggagaagctgagtaaacatcataagaatggggatggtgaatttacagctcatctctcaggctgaaggtgaaagaacaaagaactccatgctgggcttcatttctaggggtctaagaaacacattgagttggggtcttacacttgtaccattatggctcctgacactgggtcttcaattctatttcattgatctacttgcctatttctgtaccagtaccatgcagttccattgcttgagaacagggatggtgattctcccagaagttctttatcgttaagaatagtttttgctatcctaggtttttgttttgttttgttttgttgttgttattccaaatgaatttgagaatttctatttctaactctatgaagaattgagttggaatactgatggggattgctgtgaaactatagattgcttttggcaagatggatatttttactatattagtccagccaatccatgaatttgggagatttttccatcttcagagatcttctttgatttctttcttcagagacttgacgttcttgtcatacagacatttcacttgtttgtttagagtcacaccaagatatttatattgttggtgactgttgtgaagggtttcatttctctaatttcattctcatcccttttgtttgagtagaggaaggctaatgatttgtttt

SEQ ID NO: 35818 - DNA, 1950 bp, Mus musculus
gaaattcttggcacatggattgaagtagaaaatattatcctgggccaatgatgacgaggtttcaggattataagtcacggacgatgactacgtcactagaggtctgaggtccatagcagaagatgcctcatgtgaccctctcatgcaggggttgcatgtcaggcatgtgcatacagtagatattagccatgcactctcaccatttcatagtagatcacagaatcaagatacaaatctccatgcacggaaaggatttaaggcattgatcaatcctgaacataaatatttggccatcaatggtatttacgcacacactgaaaaatctattcagaatgacttacacaaaggtttatataacctttatccaaggtgatttatatagtaagattcatggcttatgtcttcatgatggtcaaggccttaatttttaaaattatcaatttttttcttttcttttttttaacttgaattttttttatgaaaactatcatgacaatttgtctcttaaatgaaaggagaaatgtaaaactaaatggacaaatatcaacctttttattatctttgctgttgtgccctccctggatgggtgctggcacatgatgtcttgcctgctggtccgtggttgcactctcaccatgtggatggagctcggcagctgaaaatgcattcttccaccaagatgatttacacagcctagctggatcaggagccctctaataagctgcttcatattgtaatatagacacagtaatgtatgcctgcaggctgattcccaccttcttcgttagtcttgaggtttgagattccgtttgtgtctgcaggattcagatagtaatggatatcctgcaagtcggcttcgtagagtctcccttgaaagtggacctcgtgatctagcctttatgtccgtggattgacactgtgatggattccccccaagttcatttagatattctctcttattcataaatgtcacggtcagctctgttcttatagataccagaatggatacccctaagctgatgtatatacacccttcctcggttgcgagattcctgctctggtggttgtagtcataagatatacatcgttgcgtacaccttggttgtgggcacgcacactactgttgagttaccaccttgtccaagtggatggatgccctcaatgggattggcactttctccattgctcctgcgctctgttatcagcacttcggcttcataatgtacacacagcatgccttcctcactggtcaccaggttcaaggtccctcatatgtgtcaggtgcatagtcaccaacaaaggccaacttcacatcaatgggtggatcgtacctcggcctaagctccaggattgattgtgctgttagagtcacagctacaaccggctcagggaacccagtggaagaggaggtggaatgtgagagccaattggaatggaagacagtgaggaaacaaggccttcgagatacaagaggactgagctcacagagaatgaggcagcaccctcaggacctgcacaggtctaagcttgatgcaatctgagcactgagagggcaactggacacaattctatattgataacccagaagctttctccagttgataaactctttcaaaggaaaaacttgttttctaccatggagtgactctggacatagaaactacccttaacagcagactccatggctcagacttccaatacaatatgaactcagttgcaatttttgcaaggtttttcgactcatagtgctttgtctgggtactttttcaccctacagagaatttctgtatatattatcgtttctgattgtagtgttttgaattttctctgggtctaaatatctctgtctcagtgtcagtatgtgtttctcatgatttttctttgcttctctttttcctattctttgcttgtattccctggtttgtgtttgagtgtctgggaactctgagg

SEQ ID NO: 35819 - DNA, 1184 bp, Mus musculus
atatgttttatatgtcttggttatagattagtggctcataagttattggttatgattaaaaatttgtaacattggtaacaaaaagttgacttaaaactggtaactctgggttagagtaatttagaactacaacatgcagcatgagaaaacccatgggaacaggtctctaaagatacgcctgaattgggtaatattctgtgtaattcttatcctagaaatctgatttataaaagataagatttagggtagtgtctttgagatatattggcggctacaccttcttgtgtttgtgtgcaggaacggacagccaaactttgtagcaagtaatgtttttagagttcatttttaaagaaaatagattgtttacactgttaaaattgggttttgcttctcaaaattgtggttgtgctctcatgttacaagagaaattgaaggcttctcctaaattggagccaccagctaaatcggctcctctaaaatctataaagcctcctgagtggcctagtccacaaccttccctttatccacagcctcgaccccagccgccgagggaaccccaaacccctcggggcgttgagaggcggaccgctgtgagtacatggagccacagcgacccacagagcagagtccgggcggactctggtggacccgcccaaactttaaacccttcagtactggtcattttcctctgctggtatttataactggaaaactaaccaccccctttctcaggatccccaacgcctcacagggttggcggagttccttatgttctctcatcagcctacttgggattactgtcaacagcggttacagatgcttttaacaaccgaagagcaagagagaattctgttagaggctagaaaaatagcctgggagccaacgggcggtctacacagctacaaaatgagatcgacatgggattccctttgactcgccccagttgaaactgcaacatggctaaaggtagggagagcttaaaaatctatcaccaggctccggtctccaaggtgcctcaaaacgggcccactaatttggctaaggtaagaggtaatgcaggggccgatcgaaccttcctctgtgttccttgaaaggcttatggaagccttcaggcggttcactccctttgatcttacctcggaagcccaaaaggcctcagtggccatggcctttcataaggcagt

SEQ ID NO: 35820 - DNA, 1984 bp, Mus musculus
ttagctgcccagttgtaccccctaaccaaggaagggaggtgtttgtgtggaccccagatcaccagaaagcctttaaagagattaaaaaggccctactgatggccagcctatgcctgacctaaccaagcctttcactctttatgtaaaagagagagcaggggtcaccaaaggagtccttactcagactttgtgactttgaaaaaggccagtgacttacctatccaagaagttacaccctgttgccagcgggtggttttcttgcctgaaagctattgctgccataatctgcttgtcaaggatgctgatgagctcactctgggacagcaaataactgtagtggcatcccacactcttgaaagcattaccaacgctcctgtgacacatcagagctttttgttgtctaaatgagtgatcttcgcttcattccacctgctgtcccactgcgtgagactgcacctactcatcactgcgctgacattctggcagaagaaatgatctgaaggatcagatcagccttggcctaaagacagtagcctcgaggttaaaggtaagcagaaggcagggacagcagtatggtggtgaacagaaagcaagtgatctaggccagcagccttcctgagggacgtcggcccagaaagctgaacttatgactttaagacaagctctataaatggcaaagaaaagtctacactgacaacaggtatgcttttgccactgtacggggcaatatacaaagagggctgttgacatctgcagaaaaagacctaagatgctgtggctaaaaaaaatcaggtggcagatctaaccgccaatcaggtggcccaaggagcaatgatcctggcagtcaaggagcctaaagattattatgacatcagagagaccagctttagatacaccgctgagcactatcaagttatggacagtatttgacttggcctgggggccaagaaattcaaaggtgtggttaggtcctttgactactatgttacaggactctctgacttggcagaagaaatagtcaaaagctgcaaggactgtgctatgacgaggtagaatttctaaaagaaactttcccaaggtaattggatccaataaaggacctgtctttgttgcccaggtaaatcagggactggccaagatattagagatcggttagaagttacattgtgcacgcaggccccaaagctcaggacagatagagagaacgaatagaaccattagagacccttaccaaattgacagcggagactggcgctaatgattggatagctctcctaccctttgtgctcttcagggatagaaacacccctggacagtttagactgacccccctccactggtaaaaatagcctctgtacatagtgctgacatgctgctttcccagcctttgttctctaggctcaaggtgctccagtgagtgagacagcgagcaaaaagcagctccagaaggcctactcaagaaaagaagacctgctacattagacgtctccacgcaaaaaaccttgagactctggtggaaaggcccttatcttgtactcttaaccaccctactttctacctttatgggaccccttttgattttgcttctgcttttaattataggtccatgtgtgttaaataggcaagtcacccttattagaacaaaaattagtgcagtgcggcttttagttttgagacaacagtaccatgccataaaggatcaagtatgtcaggaaaaagatagtatctagttctaagattagaactactaacaagaagaaggggggaatgaaagagtagtaaactcagtgctccaaggtatgctaatcataaaacagatagtgacattcctccacccacccacttcctgagttcaaggagtattcattcaaagaaagtcaccctggccattaccggaagctgcaatgcaaatgtgctattgttaggggctcttagaaactgtcttgagagttaacaattaccaggtattccttgtgacacctgt

SEQ ID NO: 35821 - DNA, 1452 bp, Mus musculus
aagatcactgataatggttttcaggatgatcacaaagccttactatacaattgtgtgtatctttttaatcactttcatgggacagcattcaagcatctatgttaggtaaggaaaaggagaacaaggtgctaaaattaagaattatgctttcataaaaagaaaatgaggtacactgtgttaatgaaagactaaacacagaaacggtttgagtctttgttgccccatatccttactttttcaacatagtgtagactatccatgtttcacctcatgggtactttcaaaatagagaatgtaaagaaagaagataatctaaagaaaaaaaaaataatttccttcccagtaattaaataaagttaaaggacttttatctctctgatccagaagtggtagagatagaaagtgaaggagagtatatatattccctaagaacttgagttaaggactcctgaaacttcttggtaatgcaagagtcagatgagatgatatgtctccattcattttggtgtgtgcattgtgatataggacagataccagtcactttctactaacctctctcaatataaggatacagaaaaaagtaaaacttgatgaagatgatgaggacgatgatgaggatgatgaggatgatgatgatgatgattttgatgaagaggaaactgaagaaaaggtcccagtgaagaaatctgtacgagataccccagccaaaaatgcacaaaaatcaaaccaaaatggaaaagacttaaaaccgtcaacaccgagatcaaagggtcaagagtccttcaaaaaacaggaaaagactcctaaaacaccaaaaggacctagttctgtagaagacattaaggcaaaaatgcaagcaagtatagaaaaaggcggttctcttcccaaagtggaagccaagttcattaattatgtgaagaattgtttccggatgactgaccaggaggctattcaagatctctggcagtggaggaagtctctttaagaaaagggtttaaacagtttaaacagtttggggtatctctctcaatataaggatactcataaagtactgtcattgtaaatgtaagaacatagatgcacatgcaagagtattttctgattctaagatcgattgtagctaccttcacaggacattgtttaggtgaagatatagggggaacctttcatctaattcctatttctcataggtgaaaatatttaaaattagggacatagcactatggaaaataagtttagtttcattttaatttttaagtgctttttaaattaaaatattttataattctcccctttcgtttcttcccttcagccactctaatcaactaacccctttgttctctctctcattcatgccctgcttagtccatattttgaaagttttatgtatgttatttcagtgctgaccatggaaaagcagttggtgggctcttctctgctgagtactatttc

SEQ ID NO: 35822 - DNA, 2473 bp, Mus musculus
aacaagtataacttgttttagatcacagttaactgcaataatgaaaagactgtccatactaaaccattacagagtgcctccagtgaagggagccggctgcgcacgggtaaagatcgtaaccagaagaaggaaaagccagacagcgtagatgggctgcaaccgctggtgaatggagtaccctaaataagctacataattccgaagttatatttcctctaccatttccgtaattcttactccattttagaaaactttgttaggccaaagacaaatagtaggcaagatggcacagggcatgaagtgaacacaaattctgcaaagaatttttttgatattggcaataatcaacaatcttccagatttgcacaaaaagatcttgaaatttgatgcataacttttaagtacacttaacacttcagggcaggattttacttttattttttaaaaatactaagcagtgatctttattaactaggaccattttcctgaattggactatataactcagcagtatgtttcagtctttcggagtaaatcacatttgtgataatcatactagatctctgtcttcagtctcatttaaagtcttcatgaaatgctgtgccatttcatgtcctgtgtcagtttatgttttggtccacttttccagtattttagtggaccctgaaatgtgtgtgatgtgacatttgttattttcattagcaaaaaaaagagttgtatgatctgtgccttttttatatcttggcaggtaggaatattatatttggatgcagagttcagggaagataagttggaaacactaaatgttaaagatgtagcaaaccctgtcaaacattagtactttttagaagaatgcatgctttccatatttttttccttacataaacatcagcttaggcagtataaaaaataggacttgttttttgtttttgttttgttgcactgaagtatgacaaatagtgttattggaagggatgtgtaatttttctgtatagacaggagaagaaataactatcttttcatttgggagaggctaaagatgttttcagctacttgcaaatcttcctggtcgaaagttagtaggatatgcctgctctttggcctgatgacgaatttcaactttgaaacattttcttttgtcctccccaaattttgtcaagttttttcattcatattttacattaaagcttattttggggagatatgaaggtcatcttcataaatacataacaaccctcaaaagtatataggtactttgtctgagaaacattgaaagcaggttaaatgttttgtaactttgaaatacaaagtctaatgcataagcagaaccgaaaagcagaccgacaattggttaacaaataattctttttttttcttttttgatgtgttgagtcttatttttgtggggtttttttctctctttttttttaaatgactgaaattcactgaagaaaaatatgtgaaggaccttcactctgagatgttatatttttttttaaaaataactctgagtaggggtaccactgaatctgtacagagccgtacaaaccgaagttctgcctctgatgtactttgtgaatttgtttctttgaattttcatttttcatttagttttccttgcatacaaataagcatataaaatggcaacaaactgcacatgatttcacaaatattaaaatgtcttttaaaaagtattgccaaacagtaatgttgatttctagttatttattctgggaatgtatagtatttgaaaacagaaattggtaccttgcacacatcatctgtaaactgttcagtttaaaatactgtagataattaaccaaggtagaatgaccttgtaatgtaactgctcttgggcaatattctctgtacatattagcgacaacagattggattttatgttgacatttgtttggttatagtgcaatatattttgtatgcaaacagtttcaataaagtttgatcttcctctgctaaattgatgttgatgcaatccttacaatgattgcttttaaaattttaagataggaaagaaatctatagaaagtgttctgttacaaaatgtaactgttaccattggaaatttcacatgtcaaaggaggttagccgttatttaccaactttcaagaacgtaatcttgttcaataaggtgaaatatcaatgattggtacacagtcacaatgtaccgttaaaatatgcactaagtctcttttttttacaaaggctgaattcagcaaggcgctaacttgcttaaatgtgaattactaacttctaaaactgtaatttgattcacatcttttcaaatggagttggagttgattcatattacaatatttgtgtgcaaaatgtgtatgtttttcagtttaaagtcatgtttttaaaatcttattaaagtttcaaaaatctgaagattgtttatcttatctagatgtaaatttttattaaaaagttgcacttatgaaaaagcaaaata

SEQ ID NO: 35823 - DNA, 1177 bp, Mus musculus
aagctcatcgaggtggatgacgagcgcaagctccgcaccttctatgagaagcgcatggccacggaagtagccgctgatgctcttggtgaagagtggaagggttatgtggtccggatcagcggtgggaatgacaagcaaggttttcccatgaagcaaggtgttctgacccatggcagagtgcgcctgctgttgagtaaggggcattcctgttacaggccaaggagaactggagagaggaagcgcaagtctgttcgcggatgcattgtggacgctaatctcagtgttctcaacttggtcattgtaaagaaaggagagaaggatattcctggactgacagatactactgtgcctcgtcggttgggacctaaaagggctagtagaatccgaaagctttttaatctctccaaagaagatgatgtccgccagtacgttgtcaggaagcccttaaacaaagaaggtaagaagcccaggaccaaagcacccaagattcagcgacttgttactcctcgtgtcctgcaacacaaacgccgacgtaatgctctgaagaagcaacgtactaagaagaacaaggaggaggctgcagaatacgctaaacttttggccaagagaatgaaggaagccaaagaaaagcgccaggaacagattgccaagagacgtaggctgtcctcactgagagcttctacttctaagtctgagtccagtcaaaaatgagtctttaagagcaacaaataaataatgaccttgaatctttcattggctttcattaatagtgtaactagataaatgatgggaaagatgagacagaaggaatacatctataggactgctagaatatggggagagtgattattttcaaattactatgtattgagcttctaccccaaggtaaataaataacatttggagaccattaaaatgtaggatggcatagaagaggccttaaattactaagattaataattaaagaaacacagcctttaaagtaaaaaacactgtgcctttgaaacttgttaaaaagattaacttctgtcccaaaaggtatcagccatgcgctaccagcctccctgcccctacagtggcagtggctgcattcttggtgaatggtagtggaagggattaaacctaggcctcagtcatgcttcccagtcactggtactgatttgtatgcacccgctta

SEQ ID NO: 35824 - DNA, 3073 bp, Mus musculus
ataatactgtacttaagaaatcatttgcttgttgaatttagtgcatttcagatagtaaccatatgtcttacgtagcccagagtgtcaagcatgttaacatgggatttatttctttctcaaatgtgaaattcaagttgcttctagagttattgcttctaagactacagatttagaatcaaaggtaaaatacccatgtgatgatcaatgtggtgtttcttcattaaataataaataatgcttagtaaagtatagttaaagttaggaaattcagttaagtatttcaatactctctggcccaaataataatttgttagtaaatactacaattcttgaactcagtggctatctgttaaaaattctgttattcacaatgaaatcatctcaaatggaactattcccatgatttgaatcattccagattgtattcatatgcctatttagaaaactgcagatatccatgtatcctggaggcaggaggtattctactttttgctaaaacaaaacaaaacaaaacatgtttatgaaatgtaaattatcttgagggttgtggatactttttattaatagggtataagtaattttcagaatgtagttctgtgttccctaagtacgaaggtaactagaatatgggcatgtagtaaggattaggttatttcattactgtcaccagacagaagtccttcctctaacattgtgaaaactgttcaattaccaggagtcaacagctttctaaataaacattctatgtattttgttttgtatttaaatgagtaatttcaataatttcattaaaaatgattcagtgtctcaaggtaaatgtttttaaaacaaaaactatagtaaatagctgattagattaagttactgtcatgtattaaattgtaaccaaaaagtcaagacactactttgaagtgtgtaaaatttcaaagagagattgttgattttaccagctggcctatagtagagtagatttgtctgttgttctgaaactgacttttgcaaaggctttgctcccatctttccttgttcttgatctttactgctctcctgatgtctactcagtgtcattttacaatttagtttagaaactcctcacagcatgttttctttttttttttagcttcatctccttcatagagggacagattttgacacaagtgtttatttgacatctatttattgttcctgtttggccatagtgtgtgtgtatgtgtgtgtgtgtatgtatgtgtatgtatgtgtgtgtatgtgtatatatacatatacatacacatacatacacatacatatatacatatatacatatatacatatatatatatatatatatatatatatatttaatcttccaaagtacagttttagtttaaacccctctgaattctgcttccaatgacatatgtggctatttaaatttaaattcattaacacaaaataacattttaaaaaatttctgttttacttcgcacttagaaccttcccatcctagcagactggacggagatgccctggattcgatctagatgtgttcaccctgattggcaggtccctactgtcctgcacttgcccacaatgagcaaactatatttggtttaggcatagagtagggagtttgctgtggccatcagcttcttccttccactctcatcaccattgcctctgtccttctttctttccttcccaagaaatttccttcccctccttttccctcccctgttccttaaagaatccatgtgtcttcctaaaatccctcttgacccctgccctttaagaacaccgtcagtgcctactaagggtctagaaagacctccgttgagcagtcagagtcttccctggctccacaataccccttcccttggctgactctccttgccaatccttacctccctggtccttcaagcctttgtcccctcttctttgctccaaccccttcacagccattcttcatagcctggctcccctacccccctgcttagaagctgaggctgtcaggactctctagagtgtattatgggggaaaatgaacacatcttaaaaatctgttatttgctacatttttttagaaggcatttttcctcatgagtttgatatgttaattatacagaaattggaaagcagaaatgcattttaaaaggcaagaaaatgtctgagtgctttatactaagattgccatagtttgttctttttggggtatgaatgttttacatttcttgatcctctatgttgtttataatacaacttctgctctttctttctgaacattatgtatggttggttattagtgaattttgcagatattttatattgctggtaatatgtgttattgcatagatttattgtaattttctcagccttctttcagttgttagaaatttagattatttccaaattttcagtgttacaaataatgctgtgatcaattttgtgaatatagtgtttttacgtatttcaaagtattcccataggctagtttctcagtgccaagtcatcaaaaacagctccgttttctcttcactcttgctatgatagcatattaaacttagaaaagaaactcaaaaggcctatattaaaaaccataataccaaaaaggaaagtctgtagtcctataataatagatgagagttgtattctgctttaatatctgattctttgctgattaacgacatgaaccattatgctctctgtatgacagttgtgtgactttgtgtggtcatgttatggatcttaccttttaatgtaataaagtaaattgctcttttcctgtgtgacagtttttcctgtatatttgttctaagcgtagaacaactctatttgggacctgaataaatactcattttcctttgaaattttttggggttcttaatgttaatgtctttctacctaattataagagtaatgtatgcttattgtgtgaaatggtaaaaatatgatgaagctagaaagaagcccactttcttagttgtctttttgaaattatttttattttatgtattgagtgttttgtctgtgtgtatgtctgtacaccatttatgtgcctgatgctgttggaggccagaacgaagagttgaatctc

SEQ ID NO: 35825 - DNA, 1041 bp, Mus musculus
gtgatggtgatgttctgaggcagtggaaacagaggtgtacaaggagttgtagaattgatggtgatgatgacacaatatgaatacatttattgccactaaagcatggttaaggttgtgaagttcatgttttgtgtttttaccatattaaaaagaaaatatggatcaaatacaaacacttaaaaacaagtcatcttcaacagatttttacacagcgggtagagctttaattgattaaatgtgtctgaatcaagtatctagctctaaactttaagtagtttaaaaatgcttctagctggccagagactgtaactttccctcctgctagtccattgggtgtcatagtgaagagtggcgtcctcaagtagcacttccaagctgcttttacaaacaaatggatgttgtgtatgaagaagagatgggggagaggtggtgctcagacaggcttctgctttcgctggtgtctgcagtgtactacatgcaaccgtgctgtttcctgtttcaggcaggcacaccgaggacctcgtagaacttgtatctctcttccccacgctcgctggacttgcaggactgccagttcctcctcggtgccccatcccttcttttcatgttgagctttgcagagaaggccagaatcttcagaagcatttgcagctccatgacttggaagaggagccagacttgtttggtaatccccgggagttgatcgcctatagccagtacccccggcctgcagatttccctcagtggaattctgacaagccaagcttaaatgatataaaggtcatgggatattctatacgcactgtagactacaggtacactgtgtgggttggcttcgatcctagtgaatttctggctaacttttctgatatccatgccggggaactctattttgtcgattctgacccactgcaggatcacaatgtatataatgactcccaacatggaggtcttctccactcactgaggccttgagttctgccagcctcagtgggcacatatgtgtccccttccccccctacccattgtattagatataac

SEQ ID NO: 35826 - DNA, 1207 bp, Mus musculus
actattgcaagccaggggatgcagatacctgtagaaatttcagagatggcattccacaaaacttgattttgtttggacttttggtatctatggctgggaggcaatttatttctagttcttcaagtcaccttgtggcttgaattgagccgagtggtatctttggcataccccttatcagagaatgtgtggctctgagcatacaaggattaagggatcattttctgtttagatattcatttctagggactgtctggaatgtgcagagtagacagaaaggtacagtaaattgcatccatttgccatgatctgtatcctaaagtaaaagctgattaaatttcaaacatgccagtttggttctgcagattttaagttagtctggactctgcaggcaaaggagaaggaacattaggttaaggctaagaatcagtgaatggagaggttgggattgggagaaatgcttgttcaggtagctattcattttgtatgccaaggtaaataaaattgttttcattcttgtaattctgtttttcatttgcagcggaaaatccgccagagctactttgcttctgtgtcctatttggatactcaggttggacatgttttgagtgctttggatgatcttcgtctagcccacaacacaattattgctttcacatctgatcacggtaagcgttttgcagggtattggtgaattgagtatctcagtttcctgcaaaggacactttgaaaaattcccatgtccataggggtgctctgagtccaggatcatggggtgcttttaaaagcaacttagttgtttgtgcacctccatcttggatatgtgaaaatggaggcaggtgctgtatctttttatcttagttgcttgtgagagaggatttgtttttgtctcttaacattttaaacatgttttcttatttttaaattatatatatatatatatatatatatctgtgttggtgtgcatacatgagaacagtgcctgcagatgacagagagggtctggagccatagacagttgtgaactgtctgacatacgtgctagaattcaacttcggtcctctggaagggtagaaattctctgaactgctgagctatctctccagccccagtttattttatctgtatgtgtgtgtgtgtgtgtgtgtgtgtgtgtgtgtgtgtgtgtgtgtgagtatctactatgtgcgcagagagcagctggaaattg

SEQ ID NO: 35827 - DNA, 1215 bp, Mus musculus
tatggtcgaggcagaatgcctacatgatgagacccatgtcaaaactctatgctacagttttattgagcttcactggttggcagcattaaacatgtactgtctttcaactagctgggacaccatgtgcctcctaggtgaaattcctgggaagggactctgaagctggtcactggtttcctccagattttccttcatgtttgtttttccttttctgaatgggtttgaaatattttcactctagtaaatgggaccttgtgctaagtcctatgagttctcctgactcactgaaggttaggggagttttgggaacccactgtgcttcaagcccgcctttgtatgttggaagtaaggtggggagcagtaggagggaacagttgttgctgcgagtgtcagaaccgtggcttaggatttgttgctgttcagatctataaggcacagagcaggtgagagcgggtgagtagccggaaggcattagcgccaagccaatgtatcataggctttcagaaaacacaactttgtgcttttgccaaacgactagcaacctgtggctttgtatattcttgtcctaggaatttcagaagttgtatcccttggaaaacataaccctggctcctgatccccatgttcctgatagcctaccacctgtagcctacaacccctggatggatatcagggagagggaagatgtccaagccttaaacatcagtgttccctatggaccaattcctgaggattttcaggtactagtactatgcttgggggataagtgattgtgtaataccattggcgaggcaacttttgagttcaaggtcaacctgtttacataatgagctcaagaccagtctagactaaatagtaagatcttgttttaaaaagacaaacaaaacccttccttacgattttttctgagcagtggatttctcttaatatttattgacatgggtagtgctgtgcagatcaagttttcttactagtaccttagctcccctaagaagtggcatccagactcgttataaacaggcacagggatcagatgtagtttgggtgaacccccctagcccatgggggattaatattggtcacagttgggatgtttgtagaaaagtgcagaatctttagtttgctggcactttgatttactctgagggaaagcctaaagtggcacctggtactcttggggtgacttgagtgagctgagccttggaccagaggtag

SEQ ID NO: 35828 - DNA, 1793 bp, Mus musculus
tgtgtgtgcactgagacacacactcctacttcccttgcccccaacctagacctggaacctcggaccaccatctgaagcctcgtttgcatccagtgtcaaccagccactcagaacagaacataggtggcagggactaagggtatcttatcaatgtggatgccagtgacacatgagcaaagaacctatttctttcgtatgggtacctgaaatgtgttctcattcctgtgatacccacccagggatgactgctgcctaggcccacagaaagcacatctgtggtctgggcagattttctagtgctaaaattcctatcaaagtattgaatgatgtggttcctctgggaccacttccatctgtggctcagctgtgctgcttatgggtagccagtagggactataagtaggtctgtacacacctgctgtgttcagatacagcccggccctgctttccttgtctctgctgtacagaaatttagctttagccaggatgacagcaggtttgcagggcctcatcagtgagcccttcccaatggcatgattccatgcctatatagtatttatacagctattttagcactgtaatatacagtgtcaaatcctagttctgtacagcatattctctgttaaagtatttttttacaagcttgtgctggagatggatgggttaagccatgggagaagcagatagctcagactgctgtatctcagtcagatgccccacctcacttaccatgcccactgataccctggaatttctgccagcacagctactacaatcaaggaaagctctgtgcttttccaacatggggtgtgggagaaatggcttaaaagcccaagaaatgcccccttgagaccaggacactagagaaggttgccaaggcaggccagaatcagccaggaactcctgcaaagtcgagagcattctgcctacctgcaagaagaacactgcatactgggcatgcaggtaccaccacctgtcagcagtttctccaggctctgctggtatagccagcccagaacccatcataccagaaaataaccttcagtctaaatcaaatgattcattcatggtcacctgatcagtggcttcagtcacacataattgaagtctctaaccctagtcctacccttggcacaggcctccagtgagcctgttctgtttcagaagaaaggggaagcagtgtagcattttttgtttggtctcttaaaaatgtggttaaatccactattttttgctcctgtagttcaataaagtggttcattttacatgtatactgtgtgtattttattctgtagaaaaacctgaattaatctcacctaatgacaaggacaccctccggctaccacaggcaagtaaagcaggcaggtagggtgagcatcctttgctgtttcttcaagcagcagtagagggaagaaactcttgccacccatccccagtgcttgcttgatggccttctgccattgtgagagctttgggggctttctagactttctgaggttctagagcatgcctgcagttgcactacacagttttatctagctctcttaactgtttctgaagcttaggaggaattttactgggaggtctttcaggttgaaagaatctgtaaggaatcctgtggctgttgataagaaataccctgcatgtagccagagatcaggcataaattctttcttgagctccttggatttcataaaaaactttgttaagtcaaggcagttgctggtactcagctgccaggagctttgcttctgtttgaggtaccactggttctcagtcttggcacttggatg

SEQ ID NO: 35829 - DNA, 1179 bp, Mus musculus
cttcaccagcagccattccttcctctttatgggcgtgactgggacagaggtgagttgtaaggacattcctagcattgggtggtggtgctttaaattccctttgttggcctgtaaatttctttatggccctgagattgcttaggtggggatttagaataaaaaggactttacttgatttcagtattgccaagaagtgatcccagctgttttactcagccttggactgtcgctatacatcagtgaccctctggctatgactcttactgtacctcctagttagtgctgttcaacggtaacaacctgcagaagtttgctgttgacttcagggagacctcaggctgtgtgactagcagcaagtatgtcatttagagtttcctggttctgagatgttccttgtgcgtgacagtggggatgtgagagcatagcccactctctgacaaatggcctctacctctaggttccttgcctaaagaaagtctggtggttttttaagtagaggatgataactttttgcttttcagtctttcagctgagatgaagtgtaaatcagaggctgactctttccctgtaggacatttcctttcttcctgttatcaagtccaatcatttctacagagattcccatcatttctgtgtcatcaaacaattttcctttgttgacaaagattgtccagatgcccttaaccctcaacagctgctcctgagaacttataaccaacgtagaatcacagatcagctaagaacccctgcagaatcttcaatttcaggtgtctcctgatgcatatgtgtcaatgaaagtctaggatagctgatggaagacctggtcacatcttggcttcccaagcctttgaaacaacattaatcaataatacagtgctagatttaaaaagtaaacaggcaaaataaatttaaacatgtttttgtaacggattatatgtaaaatactatcatttacatataattaccatactaatgaagcatcacccttttttttttgtactagacttggaaatcatttgtgtatttttcttataggacatctccatttcgaccagccacatggttggtgccagtccctacagtgtgggacagtaggacgctgagagacgagttcatcaggttggcttttagtgaccagccagctgcctctgtactaacttatattaatgttagggttaa

SEQ ID NO: 35830 - DNA, 1200 bp, Mus musculus
tgtctgtctgtctgtctttttctgtgtctctgtctccctcccttcccttccctccctccctccctccctccctccctccctccctccctccctcccatgagacagagtatcatgtatctcaggctggccacagactctatgaaagcaaggattaacttgaacttctgctactcctacctcatcctcactgggattgccagcatgtaccaccatggctgggttatgtgacgctggcctggaacccagggccttatgcatgccaagtgagcactttactgacttgagctacatttgcctaggctaacctgaaactcatgatcctgttacctcgacctcctgaatgacaaatgcatgttgccaggccttgtggacatcctcatacccctagctctcaacaaacatagaggtgaactctcattaatagggggagaaggaaaagataccattgttgaaaaatgtataaatggttttgaaacagctcaggctggcctaaaactcactatgtagctgagagtgactttgaatttctaatcaatcctcctacctccacctccccacctccccgctgttggtcttagtgtttggtttatgtgtcattgaggatcagacccagggcttaatgcaagctagtgttgtactcttccaaatgagctacatcccaaaatggctacagacggaacagacggtgagaaggatcatatccggaaactatcttgcgttttctctctctctgctattttggtctttttgtcatggtaggtggttgtggttcttattcttgttttaataaggaagtgagacattttggggggagtagggggttttttgtttgtttttgtttggtttttttttttctttactgtctctggatctcaccaccagcagttgtttgcctttcaggaaacacccacctggtagaagggagaagccattaggaggagctaatgagtacattatacccttactatactgacaccagatggaatgtgtttgggaaacaattctaccaaaagtttctatatttctgatcaaataagattttaaaaatgtttctttataaatattttcaactttattaggatggaagtttataggaatacatcttttaaactattataaaggtgagactaaaatttgttatgatttagtcaggaatagatcttttcaactattatgaaggtgaggctgaaatttattatg

SEQ ID NO: 35831 - DNA, 1169 bp, Mus musculus
agcatgtgttgaagtcaaagagattgtactctattcttcagagaccccatgcctaggaatggtgcatgaatacatgtgtaggaagacactcatagaccattacatatagcatagaggagccctggatatgagctctgtattttaggactgtgtccacagtgcagtgtgtaaggaaagtatgtgtggttgtcagttcttgggagcttaatctgaagacagtagacagatagcatggctaacagaaaagatgacttgtgcctgtgattccttatagcagcccaacccagtggagcagcgttacatggagcttttggccttgcgtgacgattatataaagaggctcgaggaattgcagctggccaactccgccaagcttgctgatgcccccgcttcgacttccagttcgtcacagatggtgccccatgtgcagacgcacttctgaggggactcacttctggcactgcacttgaactctagataagtgaaatagctgactctcattctgggcatgtggacaaagtagatttaaagtgtctgcctccatttagaagttcaactaacatcttagacttttgagtatgtgccttctgtaatacatatcacaagaaatcgatggtgtccgtgtggcaatcataaggaaggagtcaagagggggttctggaaaatcctcatacttttttttacaaagcacttttgcaaagataaaacttaaatttaatttacctctatataaattctacatatacagtatgtattttgtgggcttaattgaaatattattttaaatccaggggggagatttgtttgcaaaatgtattttcctccagctgcttataacagttgctttggattatctaaaattaatccaaatgtgaaagatgggtattactgccaaagccaaattgcactctgcttcttcagcaaattccaagagcaaggcgtttaaataattgccaatttttattttaccataagtggtaaggtaaaaagaaagatgaacatttcatcattttgaatttttgaaaataaaaggttctcccatcatttttcaagagaagcacatttttatattaagaaaaagtgataaggtttgatttttttttccctcaacattctcagctttgctttctaaattatcccatgatttttgtctaacactgagtcatact

SEQ ID NO: 35832 - DNA, 2576 bp, Mus musculus
tctagcttgtcatcttagctcttaggactcagcccagggaccatttgtgggtggtgaaagctcctattattaacaagtacttcttttgtgtgaacagcctgtgccccttttgcgagcagcctcaccctgtgaaccacctgtgtcttgtacaggtagcttgggagaaaccagattgaatgcagtgcggtattttaacttaagagaatcttacaccacttctttccaagttacatcctttgttacgaacaactcgtttacttatagaacacatcaccagccatgtggctcctctcagccttttggcacaatttaaaaactgttttaaatgaaatgttagtgtggcaaatgaaccattgccacctgttctacagttatcagttatcttcatacaagaagtcctgttcaactggtacaatatgtactgctgtgtacatataaggtattttttaaagagaaacatgcctttattttcctatgtccttttttatgtttagaatagcctgagaaatcatctgctaaactgtgctgtaggagaaattctttcccaacggagtccatgctgccttttgcgcagcacatttgaattaagattcgagatgtgtcagctcagtggcaatggagtgttgtcctctaactctggtacttgtcttttgagatggcacagcccattcattcattggtggtagcagcaggttccctcaggatgcagcaaactatgaatgctcagtcctctggccttgtcgcaggtaaactgagggctcaggcagcaactctgcatttgttggcctccctctatgacagctctctaaaggagcaagtcttgaaaattgctttggcatcctaccacctgttaagatgcccagcatctatgtcaaatcaagtcgtctctcacctgttagacacctggacagcttgctttcatttaccacgatctcttctcagttgatttacatgactgcctggccatactttaaggcaaccagtggctaaaatactcatgaaattaaatatcagtgattgcactgaactgtatacttcagatgagctaattttactacgttaatttagcatttatttaagtggagaattaattagttttgtattccctattttacaaaaattgataaagatatagttcatggattttattctgctgttatgggtttatttctatgggtctgaaagcataacatgctcttccatggttttcccctctcggacccagccctggcttggcaggcctctttccacagttaacagtgttgatctctgctactcaaccagtccttctaggaatgaatctcccatcagcttcgacgtgtgcaatgccagcatagccaccaccaccaccatgtccacttctgtgtgtcaccaggcccttcagagttggagatgtgtttgaggctgaccaagtgagcccctgaggacagatggctcacatcttcctcttgtcagtgtcaaatcactggatgctgtgcagtcctacacattaacctcggttttcaaaagtgttcttaaaagaatttttacagccaaatacatagaaactagatgatttttcaacttacagaaaactacccaactataagataaccagagacatttattcaaggaagtttcataagttatgatcaattctccatttttaatcatctgggggatttgtttctaaactacagtttaagtgattttagcttttgatttgtgttcatcatagatataaaaccttatttgtagatggataaactgccatatctgaggtaggagaagctgtgagttcagggacagctttggctacatatcgagttctgggacagctggcctatattgtggagccctgtctcaaaatcaataccaaaaagaaaataacatgaactataatattttttttcttcatatactttttaaaagtggggacatttaccaatttttccctagaaatactgtgtaatttcccagcgacacttgaactattgaagatagagtggactggataatgttttgacagaaccagagaagccatggggatggctgcttgttgaggtcagctagcctggtacagatggctggtaaactgtggctctggctcctgctcaagccatggcctcccagctgccatgcctgcagcacccctaaaaatgtccactggattttaaagaagcacaacagagtctttccctttgtatgtttctagcacagaactgtttctaaaacaacttgaagtatagttttcttatctaaacaattctttcatgtatgttttatttaagtactataatgtaaaccctttaaggttcaggtttttaaacaagtacaatactgtatttgcctcatctgaagcactgtattccaacatgtaactaaaatgataatatgtttgctccctggtctctgttgtctctgtgttttcaccatttcagtagtttttcacccctgaggaaaatgagtactaagaaagtaccatgtgttaaatgctttccctgtacctgccacagttaatatatgtaaagtgcccaatagtagttgattaacttactaagttgtcagcaatttgttgtgagtcttgagtgggctgg

SEQ ID NO: 35833 - DNA, 1788 bp, Mus musculus
cttgtccaggtgaaggctcttcagtgattttagtgcaaacatggtctcacaatagtcttaccccaagattagaaagaaggagcatatgggagctgtgacttgcggttggattcctatcagactgtgtagggatctccggctggcctggttaacaggtcttggaagtcacctacaaatgaactttctcccaggtcagggtgggtgtttacactaccctgtacatgatcttatttaagtagcaagagctacagatcctgagaatgaacgtggaaaccagaagcatgcttgttgttttattagaagtggatggggaaaggggaaggtaggggaagggatactagcttagctgcctttgtagttgtgtagctgtcctccctgtctgctctgaaaagggctctgaccatgttcatagcggtaaatacaggaaaccaagggccagggccagagctgactgctacccctagtttgggctggatctgcctgcttcctggattgtttctttggctccagtgagcttgatagtgaaccctgcaggtgaaagctaagctagtttccaccccatatgaactaatagtttgccacgtcaaacggcacttctgaaagcaatgtgtgtcactgtgaaggcaagatctacagctcctctggacaacatgattggccccatatatcccataagctgtgaattggctccttcacctctgctgagctgggaagaggcaacactcaccttaagaaactccctaactcttgtgctgtctaatgcatgccttgagtgtgtttgctgtttaaagactattcttggtggagggctgctggtggtgtcatgtttccaggcagcctgaacaccaactcctactgtatacctgtgggcgatgagatgccccctttgcttggcctttggtcccagacggtccaggtctgaggatccaatagggaagctggagcactgggaaaatgacactaagatggaaaaaaaaaaaagctcatggcctcaggaagcccgccttattcttcaggaggttaataagcaaagaaggcatcacttgcaagatgtgtccgtttctagaacctcttaacttgctggtcggattgctgtcaacattgtcaggattgtgccttactgacaccaaggacaacaggagatgatggtgccaccatttggccagtgctgggctataggtgacttaaaggaaggattttagtatttctggtctgttgacatgtagctagctagggtaatctcaggagggttgtctacctttatgctgaggcctgtctgatggcaaagccctcaaaccccacggccatgatgtaaaataaatgccctcttgttaaactgttttctcaatagcactggttccagtgaaaaagagctctaatttgctctcccttagctacctcggtgccttttgcataaagcccttctgcataaaacccatcactcagcccgcaggcgctagctaagtggctggacaggcctgagcgggccatcggcctcctgttcatacagtttcatcccaggggccgggctcctccttcccactggcattttatacttggtggggcattgtggcctgcagaaggcttgggactggtcctgtaactgtgtcccccctgaaggctgagttggccaacttgggttagtcccaggtgacagaagggagaaaccaaatgaagcagaagagccaattgccaagatcagatctcgatcagtgaaacttgacaggaagaactttaaaaatgctcaacagtctcaagtggcttgatgtaggggctcctaccctggtg

SEQ ID NO: 35834 - DNA, 1397 bp, Mus musculus
aggaagaggaggaggaagaggaagaagaggaggaggaagaggaggaagatgaataaaagctctgtctccttgtgaataccttagagtaggagagcgctgtgattgacacatctcttatttgagtcgtgtctattgcccttgttaggtttaattacaaaatttgatcacgatcatattgtagtttctcaaagtgtcagtggtttacatgaagtggccgtgggtgtccggagcgccctgaaactgtatcaaagttgtacatagctccaaacatttttaaaatgaaaaggcactctcgcgtcctcctcactcagtgcactttgctgttggtgtgacaaggcatttgaagatgtttctggcattttgttctcaactcgtaaggtagtgttaactatatggttattggctagcaatcctgagttgtcaactgtacatatctatagtttgtaaagagaatgaaacaacccagacagattcttgatgctccttgtttggcgtggaggctgtgaggggaagatgccttttggagggggccgtagctcagggcgtgcactgtgaggctggacctgttgatactgcggtgggcatccatttagcttcaggttgtcctgtgtttgtatatagtggcatagcattctgctgacattcttagttgtggaaaggggggaggggtcggccggcatgagaagtgtttggagttttttctttagttaagtgcagtaggtttgaaactttttaaagaaactgtaggactcatcattgtcagcaaagcaaagaactactgcatcaatggaagttcaagaaccctctggacctaaacgcaatttgcaacattctgttattttttgtatgtttagaatgctgaaatgtttttgaagttaaataaacagtattacatttttaaaactgttctgtattacaacggcctaaatttctgactcaccagtctttgtcaacttgctttcttgtgcttctaaaactgctaaggtttttttccagctaaggacagataggggtgggcgggtattacctgaagtcccttgatttgtgtctggcactgttcataccatagataatggtttacagcctacagagatacaggaaagcaagcccttaggtaaaaatctctgccttccatcatgacttctttatgaggcaaccagaccccttttgaccctttgccccaggatgtgtagtaggcacttactatgctcacaatctcaagtctcaagctgtgtctcatttcctgaaccctatgaggtggtgatgtgggttggagtggcagagtggaaggcttatctcttagatatgtatcttactccttcaaaaagtcaacactagggaagattgcaggttcctctttagggctgctgatctgtccatggaggactgggttagtg

SEQ ID NO: 35835 - DNA, 1123 bp, Mus musculus
ctatatcaaaagaacagcagcaacaacaaaagctacaaaaacaatttgacttaataataataaaaaaaagcaactaatgggcttgtgcttattttcatataaatcttttgtagacaggacattcaaatgggtaagtgaaagtatacaaggaagatgtaaccaaggaaggctgatgctggaggtgtgcgaaagaaaggcttgagatccgttttacatatatccagtgtatctccagacagtttgtatttagtgtgtaagtatagtaaatctgtagacaaagtgttcagcgatggtacagtatttgtcacttgtcttcagttaatagcaggtttctttactacgttattcactagtgaaacacacagctattcagattttgctcctaaaatttatttttaacagacttgtgctatagtgtagcttgacaacattttttatcccaggagaatggagttaccttaaaataaattactttcagagatactggaaatttactcatcaatgcataacctgtgaatttcttaactccattcctttacagacgtctagaatctttccatatcgctgccggccacacttttaaacctgtgttaattgctatgtgtgcttgaagtatctgttcttttaaagatgttctttaagtcatattgtcagttttacaatctagtcttccttccatgtttggtgaaatctcactgaacaggaataatagcaataactaacaacatctgcacagcaccttacagtttgcagagaacgttcacatattcttgtctgagttttgcatagtgaacatgtcacagagatgtcccttgatgtcaatgctaagtgttagaatgttcagtcacagtgtcactggccttgctgcggcactgattagcacactgacgggtggggggaggggggcgtgccgatgtgctgtctgtaaagctgcgtcatcacaacggggcctggatagcttagccacttgcttcagactgacttgttaagtgatgcttttctactctacctgaatggcttttgtagtcagtatattgtagcctgtaatttatattaatttaccatttgttgtcattaaaaaaagtgtctgtaatgctactgtgctgtgtcctcattcggtgaa

SEQ ID NO: 35836 - DNA, 1155 bp, Mus musculus
gcagtcctacagtttctcttttctcaacagttttcacttcttcctgttctcacttatattatgaggacagaaataacgatttactaggaacaaaacacaagttataacaaataatgaaccatagatgaaaacaatagctcctggaccatctgtaccctccaaaagacatcaagtgaacagaccttggcacagccttcctccaacacccaaccctatgcacctggccagggtgaaatctatgtggagagcaacctggcaggagaatagggcatgggaaggaggagggaagtggactgtgtggcagagctccttttttccagaccactcacggggcccacttgaactctgccatcttgtttctgatgtgtaccatctgtgtttaaccactccccactggcattagtccaggtatagccttggagtactctgttgtggggcaactgataaccccttccttcatgaagtccagggcctctccttggctgttacagactggcacagagagctcaagattcctcctttgtggggttgattaatccacaggatagtttaaaccatgagatccacctccttggcactgtgctatctggctttgaagtattagaatatatatatattggtaaataggtgcattgaacttgaactttagattgtgatttctcctgatgatggtgcccttacagggagaagttcccaaagtgtgtcttaaaatttttcttagtgggggagcctctgagctggggtctaaagcctacctggggttcgctctgccatggccaggggctgatctgttttcagtgaggctttggaacacattgggcagaggtgacttgctctttaactgtcaatgataaagtaaaagacagcgctgacaccatctctacctgcccccgctgtattctcctggcctctatgccaaatcattcttcctctgcggtgctttgaaatatgtagcacagttttgtggggcccaaaaagagtgcagagcgtgggtctgctggcaactgcagtggttcccagcccacagagtcgacaagcttccttctgtccaaacagccttccaaggcacacactgagacacattccttgaatgcagttctgccttgaggccccagatgacttctacaggctgatccagcgctaaggacatgccta

SEQ ID NO: 35837 - DNA, 3841 bp, Mus musculus
tgtttctaccccagtgaggctgccagcttggagaactgaaccctgtggctcccctacctcactggcccattagaaatggctgatggagctaatatttgtgaagtgcttgaagcactgtggaaccagtgaagtttgcccatagtaagattctttttgaaataagtagtagctgaaagggactggttttagcagagggtttccagtgccactgatgttgagtgtcaacctgaagagtcaatctctttccatttgaccctttttgggccttcctctctccccaaagtctcttccccctttccctccattttgacctccttcctctgttccttcctgctttcattccttgtgtcttccctcttcccttttctttcttcccattttttccttttattctttcacttccttggtcttctagtattgcctttctgcatggagagatttggggttcagaagtcccatgcttttctcatggtagagattggtatcaatctcatccagacatgttggagattctggggaaggtgaaagctctggggccagcccagcatctcccagcattttgttacgctggtgcctgattgtgatctgagatacatgaaaacagacttaccccaatgtgagtcctcccccagctagcagagactcagacataggctccactgactagggccacagagagtatgtcaaggaatgcccactgcctttggcttgtgttgaggtttttctgttgagctccctgacagctagaggctagggatgtataagtaagagcaggaaactgactcccaaggcctatagagagtgacaggtagcccccaggggctgagaactggatgcagggtgagcgagaagcagctccttggatgtggtctgtgggttctaggtcaggtgcttcacagagctctcccaggtgacttgtgccaaggcctctgcaatggttttcacagcatagtatttagtacatatataatgggcataattcctcaaggtgcacacttggcttttatgaatgccctgtacataacttttcaaactctgtctttgtatagacattgatttgatatgatgctaacacttcagtagccacattttgtttgtttaagacttgtgtgcacatgtgtgtgtgtgcatgtgtgtgtgtatacatgtgggcacgttgtcttttctcattttgcttctatgaaatgatagctggtgtgtgattctatttgtcctaagagagatctgctctgaagagaagtctgtcttcatcttgtggggcctgaactctgtgggacccttctcccattcacatgtcttttgggcccggtgccctctgcttcagctcctatctcctatctttgtagatgtcaccaactaaaggaaatctgagcacacctgtgtgtgtatgtgtgtgggagagagacagagacagagacagagagacagagagagacagacacagagacacacacacagagacagagacagacagaggcatagaatgtgtgtgtgtgtgtgtgtgagagagagagagagagagagaaagacaggtagaaaatgaatgtgtgtgtctgtgtgtgcttgtgtacatgtgtgtgtgtgtgtgagagagagagagagacaggtggaaaatgaatgtgtgtgtctctgtgtgcttgtgtgcatgtgtgtgtgtgtgtgtgtgtgtgtgtagatgtgtgactattgacttagatacttttcactaaaaatgaaaaggctttaaaatatgactgtcacttgttttcaaacaaatcctttttaagactttttaaacaagaatggcaaccctgtatgtcccctcccagactgcccatcactttgggttttcaaaatgaaagcacaagagaaagagtggggcgcacaggtgcctggcatgtgcatacccttgcacagctctgtgttgcgccctggctgagcagttccacccaggaaactgaggcctcctctgctacttgccaattccactgccattagtgtgaattccttagggtgctccagcaaacaagcatctgcccaattgtttcgatattgtctttttggtagttcaaacactagggattaggggcagcagtgttttttgtttaagcagttagagccagatgcttcctctctcccactggatggtaactctccagatcccagacagagttgacagatcttttgacaagcaaatggcatcccatgagaaaaccaagaaaaaaaatccaatattgccactagattgtcttttaattcaagtgggaggaagatggcagagagaggctgagttgccaggacagtgtctttggaacagagtgtgtgctctgactgtgtgtctgctcagtcaatcctgagctgctgggtcgggctgcttttcagcctgtcaagtgctgaagctccattcacgggcgtcaccgatcttccccactgaaatctcctaatactaatcagtataattagctaattttagactgctgcaatgaaattgcttccaagtacagtaaaagcccattaatttgagcacactaattcagaacttagaggaaatccaaatcgagataattcacagtaactgttattcttgctatataaaaatatttgaaagcgtcttcccttcattcagtcttcatctgtataaaaggaattctgtttaaaatgggtacctttttcaaaggaaatgctcaaggtaccaaggatcccttcattgtgccttcagcttggagtttagcagttcttgtgtctaaggctctttctgtgcagggtgatcccttgttctctctccattgtggggatgttagatattaaagcctttcactccatgtctgtatttatcctgtgattaaattagtttgtgatcttgactgcagtttaaatacaagtatgtgtctttgtaagtgttctgtaaagcagacgttgcactaacagaccgcctgctctcatttaccctcaagtcttcaaactttagagtgtctcctttcccaggctgtggaaggagaatctctctctaggaagaatttctgtgacaaagatctccaaatagcacacgccctcagctccatgcctcaaccgttgtttcactgtactgctatctgactgctgaacgtgcctgcccttctccagcccccagcgagcataaagactgatagctaggattgggaccaaccctccagctgctttttgccacccaacctgtcttgcctctctgatgccattttcccagacctgaattcacctgctgttttactctgtcattgtgaatttgtgacaatggcaaccccgagcttctagaaatgattactgtgaaatggattaattttggtaccatttgaaactgtgctcatactcatgtcttgactgatgtcagctggagcgtctgtacatttagtcatatgttgggatttcaaatggggcctaggggcaacaaaccaacttgcttctgatctttctcacgcacgctttctggctccctttttacaattgttgagtttagctgttaacttttgtctctttctgtataagaaaataatgattaaaaataaagatcacatggcatccacttgtaccttgtcctggtcgatcatagatcctagaagactacccatattttgcagaatgtggaagtctggtggtcaaacttgtggcatcaaaagtcagattgaatagataaggaaacagcccaaaccagtttaggagccagttggaagcagacatagtctggatcctgaagtttgtgcttacagcgtgtaatatgatcttctgacccattctcctgtgggatgaggttaataagatctgtcacagatcttgtttagcaacttcctagtcatcagatccctggttaagtgaagactgggctcaa

SEQ ID NO: 35838 - DNA, 3841 bp, Mus musculus; identical to SEQ ID NO: 35837

SEQ ID NO: 35839 - DNA, 1130 bp, Mus musculus
cgaataatgaggatttgtgagttggtcagttcatcattagcatattttcagctctttcaaggcagctgtcatttaaggatgaggtaactgcctccatcagagtgtgggtggaggagtaaagtcatttcttacctccgcagctcttcccaaaaagccttgtgcactcagcctaaaggtttctggtagcctgggtccaatgttagcagctgacatacagaccagcactatactactgttgcatatctgaaaaggaagaagtagagctagagagcgtgggtctagggggagcagaactatatttcaccagaggcgcaccgactccagaccaggctatccctctcaaagtccttgggccggcactatgttgtcatttgggagccctagaaccccctccctagagtgaagtgatccctgggaatgagggaaggggagcttggatgaatgggaaaggttttgacttctctctctggcttactagcagcccagaattcctcgtgtcttgctctagtgaccattgaccatcaatgtggctacctccctctgagttttcaccttttgtttccattcttgtttgaaagctgttaaatctgaatagcaatgtttgcctagagtccactggaacttggattggctctgatcacaataatttagagaggcaaagatttctgctcccaagtcatctaaattacacgaggtcacagcctaatgaacgtgctgaaacaggcattggtgcaggaaaaaaaaaaaaaggtgagatgccagtgcttcccaccgccattaccagtaccacatcctttgcccatgcatgttttacttcttgttggattttcttcttctccagacttagccactactgaacccccatcattgactctccaattcctgcagaacaaatccaagtccctaactcatagctataggcccatccctcagcaaggaatggcctcgggtacaatgaatgtgtggggaaggcagaaaaacaaaaaacaataacagactaatgaatgacctaataatagaggaatctctgccttcttacaaagtctgccttccccacatactcatctgcataagtagcctttgtctccagggatgcctctgttttagtttggaaccatgttggaattggt

SEQ ID NO: 35840 - DNA, 1931 bp, Mus musculus
ctagtatgttagacatgggtacaagtctaggtatcagcgtatgcagactttctgaggcttctgagagcccaagccaaaaaactgttgacgatccctggtagggaaattacaggcattaaatactaagggttggcaataggctactgtttagcttgtctattcactttgtgtgtatgtgtgtgtgtgtttaaatttctcacattttaaaaatagttaattttttgattgaattacatagcagatttaaattacctccttccattctcctttggtttttccagtaaggtatgtcagcacatgttggaaagtttacccaggtttaaatttgataagatacaatattaggaggcttctaccaaagggatatctgtgtctgtttgaattttgttagttagttaaaatctttaccctcagtattgctgaacttttatcctctgaacagcttttaatgtgtgtaaatcagggtaaagaaaacagatacggtttcttgagacttctgttcctactgtgaaatatttccctgaagcgtagtgttagaaatggctttgaaaagtgtgaaattcaccccatctctgggcttcttgggtccctccttgaaacactacggtaatttaattgctccctttccctctcctccagagtctttcacccagagacgaatttggcttatgtaacttctcaaagaaaagcttgctatccagtgaaacgtcaagtaggctctctgccctgatcgtgcagcattttgtgacctgttttctagtcctgaatctgtctcaaactaacatcaacttctaggttcccaggtactcaaaacactaccagttgatgtctggcacagcagaggcaggttcgtccctgcagtttgctaatatgctgctctaagtcaacctcactctgctgcctttgggctcagcattaaattggaagctccttgaaaggaaaaaaatagtcctcaagacttgggaatgcaaaattgaggcttctttgttggattgacttagaagatagctcttcactctctgcagactttgaatgggcttgttcttcctaccaggtaaccagagaagaacattctatttatttgactatttatctgttacctgaactctgaagggaagaaggagtacattgtgccacaccccaatactaattatgaactagttctttctcaagttcagctctaggatgggacttagcagagagtggccaataacatatgtgtgccaaatgaattagtaagagaaaactaagtcagtcccttaattatctaggcatttcagtgcaggcctcatagacaagagtaaaaggctctaaatcggatggcttccccacttaaaggtgtactctgccatttaaggagttttagaaatataaaatatactcaaagacagcttgtaaggctagtattgatttgaatccaaaacagcccttttgtgtcttagacacaaaattctgcagctaacaaagagagatggttttgcattgatttgcttctttttaattgctttccgtttttaattatccttgcttaatccacattaatgtacacaaattataataaatgttaagatgttacacagcagtattataacttcttttttaaaccatccgtgtgtatgtgtgcacttaagtataataacttggtagttataggccttaccagatgccattcttgctacaaaacaaaactggacatggtagcctgtgatcctagcactcaggagacgggccactctgaggtgacaggcctgatccctgatataatcttggaacactgaagaaggagtgaattgttgtcttcttgttttgttttgcttacttagagtgagcctgtctaaaacaaaacaagatgatatgcggggcccaagtctgctccatcacagggcacagctgctcggggaaccgggacatgggaactttaattgtgttta

SEQ ID NO: 35841 - DNA, 4043 bp, Mus musculus
cgttctttgcactcagcactgtgatcacatctgctgagttctagtcatctttcttatctgttgagcatttcttcaggtggaggagagtttatgtgttgccaatcttgaacctaacaaggaatgggttaaatccaatatagcactgagtgggtggcagagtgctctcctgttctttcctccactggcattggtctttgcctcctgacattggcattttccccacaggtacttgcagaatgcacagtagtgtccctggacttgcaaggaggttgctgcaaccaaaggtcagcagggttcagtgaggtttggggagctttctgtgattgaacaagactgaatgtctgggaaaaggaaaggtgatgggaatcattaagtaacatcttaacttcatttgcatttcaggttgtggaaaccaggacatcactgcctttctatatggcattggtttagaatctttgagtcctagtgttaggtctgctgatagagggagggaacaatggccgtggctctattagatgactggtgtaaggggatggatctggatcccaagaaggctgtgctcattgtgggcatccccgtgcagtacactgaggctgcgataaatgatgctctgaaagaaggcttacctcccttgtgtgcatacaaggtgataggcaggatgttcaggagggaagatgaagctaaggcagtcttaattgaactgcctgaagttgttgattatactatgatgcctactcatataccagcagagggtggggcctgggaagtggttgtcaaaccccgtagcccagatgatgagtttatgaataagttgatctactttctaagagatgaaggacggagaatagtagatgtggccaaagccctggggtttagcactgttcctacagggaaaatagagttaaagaatttagaccaagacaaaccaaaaggcttgaagtctctgtgtaataatagcacatgttacaaaaaactgaaagtattttctggcagtccctttccaggcccaggagaagaaagctttgaaacctggttagaggaggtcactgagctgatgcagttatggcaggtgtccgagagggaaaagaagcagtgccttctagagagcttgcgtggctctgccctgtcaatcatgcaggcactgtggactagcaatgactccctaaccgtggagcagtgcttgaaagccctaaagcacatctttggaaataaagaggactctaaggtcttacagttcaggttccttcagtcttctcagaaacctgcagagaaggtatctgactacttgctacgtttagagcccctgctgcaaaaagcagtgcagcagagcccactgtcagcacacagtgcagattcaattcgtctcaagcacgtcttatctcaggtctccatgaccactggccttcggggaaagctctccctcttagatcagcaagggtgcccacctacttttctggaattaatgaaacttactcgagacgaggaagagtgggaaagcactgtggtagtggaggagcaggagcaggtacgaagggacagcagcgcatgtgaggcggcaaatgaagttgtcacccaggcagaggattctagggaggtcagcacccagaccacaggagaggagatgacatcagtgaaacggaggcgactgctctggagacacagtgctggggaagagggacagaggaaggaatcaggtttctgggctgaaagtgaacccgatgagcagaaaccttatgttagagcacaggagtcggggaacgagagaggggcttgggcagtgagccaccctaaccccaaggaaatagaggctcaggacagccaggaattccttcctgtggcaggcaacagagatactttgacaaaatcatggggcagcccagacaaaggaacaggggacatgagtgttgcagaagggcaacagggccagggtaaggcacccaacttcttactagctagaaatgatcccaacaagcaagaacaaattccacacagctcagtgactaccaaatggcaggaccgtggggagtgtcagagactgaaatggggagctagtatgataactagaccacagggtaatccagaccgcagttgggatactagtgggtcacaagatggtgaggatgggtgttctgagctaagaatgcccactggcactgaagcagcacagggtgtggaggagcctgccacagggttgtcttgggcagaggacaccagtgcctgggaacaagcacggctaggcagggagacagtacccaggagaggaggccgcaggatccagcctgtcttcaggatcatctacacagctctaggggagccccatgagggcagcacccttgagtcctttcgtgagtgaactccccccgctcctgtgaaacctgcaagcctcaggacccaaaggacccgggaggcaagtgccaacacaaggcagtttccttcttgacaccctgacaggacactagtgcctgagaaaagccccaggctggggcacatggcaccacagggttaatgccctcagctggcctgagagcctgggagtgtgcaggacaggttttgtgtgagcaaacaggagcagcagaaagaggactctgtgtgtggggcgggggcaggcagggggcggggggggggagagtttgttctgctctcttttgtccagggctgctggagaattccagagagcaagcagggacaggcaggtgaatacaactctgccaggcagctgccaaggctggccccaaaccctgccgacctggagggtggcctggcagctttgccgaggtgccatcctccatctgccacccataaccaaacaggtggacatcacagaaaaggccatctcaagggttctgccaactgcctggctctcccaacacaaatgccccttcctcttccctttcccctctcccccttcccctgccactgctgtccagaggcaggctgccccctgctctggaaccccgcccccttatctgttaacctcatagtgacccagctgtccagtgagtcccttcccctatcacgtgcttacccaccatcagctgctcctgtataaagctgtgagtgagggcaactggaggccctgactacctacctggtcagccacttctacaccctggcacgtgttgtgagcttctgtgccagcctaggctacgctagctgctctcttacccacctggtgttgtgaactccttgtcagctttcctagtgtacatctaggccagctgcctgctgcttgttctcttgcagatgtgtgtgctaacctgagttcctgagcctggttctggaaccatggatgttgacaaggctgatgacttcaacttgggactatgtgtgatattcctctcctgttattacttataattttactttctagggttggtggggtgttgcatgctatggttccaccaattccctgtgcctggactgtgtatgctataagggagaactacactgtagtgagtgatctcttgagatagcagaaggccctgtgtgagcagagcctatggcttctagtgaccactcaaagtttctgttatgtttttaatggttttaatacaatttttgttgaataaatctcatgaatgttctggctatgttctttctggcgatgttctgcctcgctgtgagtgagttgggcagcagtagtggctgagttgacactggcatatatgcatgtcagagaccatgaggggctatagtcgtctcctgggtgggaaggaaccaggctactggtagccaatggatatggggtacaatagctatttgtcttcctagggcacttggcaagaacagggataaaggagctatgtgctgaagggaggatgcagtatataaggcaggccccaggattcctggtgcagcagtgtacttgtaaagagcacagggcatctatgtgatatattgacaggtatgaaaagatgcccctatagatgtcatgcctaactcagaccatggtgtttttcactccaccttgttcagtctacctcctgactggttaggggccagcttctgtcttcgctgaagggtgtttgagcactggtaggaca

SEQ ID NO: 35842 - DNA, 1174 bp, Mus musculus
tctgctctcttttgtccagggctgctggagaattccagagagcaagcagggacagccaggtgaatacaactctgccaggcagctgccaaggctggccccaaaccctgccgacctggagggtggcctggcagctttgccgaggtgccatcctccatctgccacccataaccaaacaggtggacatcacagaaaaggccatctcaagggttctgccaactgcctggctctcccaacacaaatgccccttcctcttccctttcccctctcccccttcccctgccactgctgtccagaggcaggctgccccctgctctggaaccccgcccccttatctgttaacctcatagtgacccagctgtccagtgagtcccttcccccatcacgtgcttacccaccatcagctgctcctgtataaagctgtgagtgagggcaactggaggccctgactacctacctggtcagccacttctacaccctggcacgtgttgtgagcttctgtgccagcctaggctatgctagctgctctcttacccacctggtgttgtgaactccttgtcagctttcctagtgtacatctaggccagctgcctgctgcttgttctcttgcagatgtgtgtgtgtgcgcgtgtgttctaacctgatcagatgctccccggagttcctgagctccgtctggaagccagcaggaaccatggatgttgacaagagactggctgatgctcatcttacgattgatttcagtctgggacaggaagacctgaactgggcatgggtagggcctggggactgggctgtgctgatcccctcctgttgttccttgtgactatcattccttgggttggtggggtattccttgctttgctttgtagtttcttgttactatcctgtgccagaatagggcaaggccaccctacagtggtaatcccttgtgagagttcctaaaagagtgaggaaattttaagaggtagctcttgggcctttgggaagggaaaaatagcagagggattccatggtggtgggcagacaaggcccatctgcgaagctccaggagggtggcccagaacctggtgcttccagtggctgtggagaggtcctgtgctgctaaccccttctcttcaatagtttcagcaagtgtttctgttcaataaacttcataaatgttccagctgtttct

SEQ ID NO: 35843 - DNA, 1209 bp, Mus musculus
tctcctgtcttcctcctgttcctgaagatgccccgttctgttaaaatccaaataaaccctgggatttgtgtgacagcagtgcaaatatgtctgtagggaactccagccctcgggtagagatggcaggctttccttggtagcatcgcaattactggttagcacacattggtgttgatacagtagattatcatacctgaacatcatctccccaaattggaaggcacacaagtgggctattgttgtcgtgtccagataaataattagagaagatacaggctttctttgacattctgctctgaaatgtgttcagtgatggagcctatgaaactgaccttcagcctccaaaggcagtgtgctcttaatagttaaagtagtagaattcatcaaacctcccgagtaagaaagatgtgagtaacgtggcttgaatcagtggaaatgccatttgcagacaacatttacaaggtctttcaattaaatgaatctgtcacactaagaggtgattctgaacatgaatacagcttaattcgccatcatttattaatccctcacttgtatggataggagtaacttagaatgttttgtttgtggaatttatcggccatgtagtatgggatcatcagggatattatatatgaggtctcgtgtacagttaaagctcgcgtcctgtgatttcctgtatggataccctgggtaatccttacttgggaacgtttgatttaataaacatgaaatagtttcagacttgttggcatgagtcatttaattgcattctctttctgacatccctgacgtttcaccccttctcagacagacatagccccatgccatgtggaggtgtgctgtcacctgtgttcctgcatggggccagtgtagtccaggccacttgtctcattgtgtcccgttgtgtagaagcattgaaaacaggctgtgttcagcctcccccattttctccaagtggaattgcattcctccagattgaatgagggcttccctgttggaatcattttactgtctaaaatttgcattatctagaagaacttccccctttctgcaaactacctgtggccctttggacctttagtattatttctttaataatcattaataatcataatataatgttgtattattaccagctttgaatgtctcctacttgaaatattctgcctatctttaccatatatggatactgtccatagtgtttctcca

SEQ ID NO: 35844 - DNA, 1213 bp, Mus musculus
gaagctgctagtgctgatgattgcagctttggtgcctggatcttctcctgtcttcctcctgttcctgaagatgccccgttctgttaaatccaaataaaccctgggatttgtgtgacagcagtgcaaatatgtctgtagggaactccagccctcaggtagagatggcaggctttccttggtagcatcgcaattactggttagcacacattggtgttgatacagtagattatcatacctgaacatcatctccccaaattggaaggcacacaagtgggctattgttgtcgtgtccagataaataattagagaagatacaggctttctttgacattctgctctgaaatgtgttcagtgatggagcctatgaaactgaccttcagcctccaaaggcagtgtgctcttaaaagttaaagtagtagaattcatcaaacctcccgagtaagaaagatgtgagtaatgtggcttgaatcagtggaaatgccatttgcagacaacatttacaaggtctttcaattaaatgaatctgtcacactaagaggtgattctgaacatgaatacagcttaattcgccatcatttattaatccctcacttgtatggataagagtaacttagaatgttttgtttgtggaatttatcgcacatgtagtatgggatcatcagggatattatatatgaggtctcgtgtacagttaaagctcgtgtcctgtgatttcctgtatggataccctgggaaatccttacttgggaacgtttgatttaataaacatgaaatagtttcagacttgttggcatgagtcatttaattgcattctctttctgacatccctgacgtttcaccccttctcagacagacatggccccatgccatgtggaggtgtgctgtcacctgtgttcctgcatggggccagtgtagtccaggccacttgtctcattgtgtcccgttgtgtagaagcattgaaaacaggctgtgttcagcctcccccattttctccaagtggaattgcattcctccagactgaatgagggcttccctgctgggatcattttactgtctaaagtttgcattatctagaagaacttccccctttgtgcaaactacctgtgaccctgtgggcctttagtattatttctttaataatcattaataatcataataatatgttgtattattagcagctttgaatgtctcctacttaaaatattctgcctat

SEQ ID NO: 35845 - DNA, 1228 bp, Mus musculus
tcttgtcactttgatcccagagctgttgacagttggtttgtgagcacaatgaagggggaatagccagtggccccactggctagaagctttgttggcaagtgaacttgccttgatttttctgtaggacagactttgttttgttttataccctcccgttgtactgaagtcagtcaactgcgtttcctaaggatgaactaagatgttttgacacagggcagttgaatcagtgtaacagtaagtaaggtgtgagcgttgtgtgaaagttctgggtacattgagcttgaaatcctcaaatcatccatcctggagtccttcatctcttcagtgtgaaatgaaatgaaaatctctagcctccaatgttgtacaggtttccggaggagcccggttcaccatgcaggtatgctgaaatcctcacgggtacagtgatgaagagtgggtaggcgtccacagaattctctgatggtcgagggtgtgcatcctcattggacctatctttataatgggaaaattaagcaggggttgtgctcgtcagagagactaatacttgtggaatgctactaagacaatcctgagttttctagcactaagagctgtgaagtgactcctgtctcggccaaggaggaacacatgctattagggtggtaggaactaatccacctcattttccatttccctgtcagaatattttagatctcctttcccagtcttgcatttagtgaaggaaagtcagtcgtgctgtgtttgaatgggctttcttcatgtcgagaaggaatatcacagtgttcacgttgtcttttacaggcagaaactttgtcaggactattctcttcagtttacaaatttgaataggaagttaacttcggatgcatacaaactcaagaaacatgccgaaacactctctgtgagtatcaggcttagatttaaaggagtccatttcctcagcatcagaggtagcaacacaggcttcctgcagcaggtctggagggaagggacaggacatgagctctgggagacaaggagggtggttgatgtggaggggagagactggccatcctccctgacttggttttttatcccccttctgtgggaagatgacaagggtaatgatgggttaggagcccgcatggtacaggtgtggggggatgagcaggttctgtctgcagagtgcaggagaaggtactggattgtatcctgagaggggacccttcaggatcgacaagtgcagatg

SEQ ID NO: 35846 - DNA, 1175 bp, Mus musculus
ctgtgcctctttctttccatgcctggtctatatggcctttacctgcccatctgtccatattctgagataagtgccttaggtggtgttctcttctcataatgatagtgagctcaaatgtggaactgcatcttttggtggagagttcatatagatgcacaagaagtagccactgttacttactttgattccaaacaaggatcctttgggatacgcaaagtccgtagtttaagttaaatgaggtgaggtgtcaagttggggcttggggcttcctgctcaagtaccttcttttgttgtggtttgttccagaaagccaacgacttgagtaaacgtcaaaaaacctttattggtggtcagcagactattgtggagaaggaaatctccaaggtgcagaacagagtaatcatggaaaccgtaagtcgtgtgtctgtaacactacgccctgggctaccttcctattagcagagatgtaatgaagatcctctaaatctcctttttcttttcaaacagcaagatcaagacatatccatggttgaaacataccttcagtccctgatccatgaaagctctgaagaaaccatctgaagatcacacataggatacacagggaaggaagcgttagccatgctaagaagatgttggtagtagtcagtgcagcatctttctctttactttgtttgttacaattgagactgagacactgttaatcattaagtgaactcccagcagctctgtgagtagcgaggacagttaagtgtggatcatccaggcccatgacagcaagggagattcattctgcccagtagtggcaattacattttggaagcaaatgtcatttgactttgtggttgattctctgtcactgttccaaagtgaatgttaccatacttattttaggaagaagtgaataaagatgggacccatttttctgtgcatgctttcatttctcatgaggtcacagagaccgttccattgcaatgggaaaatcaacccaacatgccaccgagacttgctgaacacactcatgtttgtgtgctcagaagtgttaaaaaaaaatcttcttaacacgattcccacgacagagccattcctaatgtgttgactctgtgctagttgtggggctgtggcatttcccaaagacacccagactcattttcaaagctgtcttcaacactggt

SEQ ID NO: 35847 - DNA, 2774 bp, Mus musculus
ctattttggattcactggctgagcagcagctccatctaagaaacatctcagacacagaagattgacctgactggtaatgttatgtaaccttcattctcctcccaacaagtgactctggaatgagagaactttgtggtttctgctttgggcaactagattgagaaatttgcccatgtgttctggcatcacttcctaccgtcacatctaagaggggtgacatataggcctggagaaaaatggagctatgttcttccagtagcctgcacaccatgccacaaaagctggttgcaccaggtctggtctatgacttggagtagccatgcccaagagggcaataaaacaagatcagaggacaggaagccacctgacattcatgtggcacagaaattgaaactgatcacactgcagttgggccattgcttcaagcaagccccctcaggagaagaagcagcaggtgaagaaggtggccacatcagggctgtggcctgagtttccagttgtgccctgacagatgttgtagggccagaaaatgtgccattattgtcccctagttagggaggttgggctctctatggggcatagcctgaaagggctttcagccccatcctgggaagcaagatctaactgacagtgacctctgatcttggttagaagggcctctcgaaagccccaggccaccacagtggccctgtagaccttctctatgctggagagaagccaacaacagttgctacatagcaacttctgttgctctgtgggctcagttctggtggtttcttgtaaaccagtctgaacccacttctttctctaattacttttctcattgtgagctgttaggacatgctttttacagctattattgggtaaggaatgttaacatcaacaagggagcaaatatggcacctttaccttgaaagaatgccatttcttgctcagtcactcatcaattgtcaaggttgacaaaagatattattgaagtctagaataacactaacttggaaggtagcagtgtgagatgccacagatagggcgtggcatctcttcccatcccttcctaccctcttttactcttttctagtttgggttctgtaattttttttctctttaacaaaacctttttcagagttaacactaaaaatcggtgtcttttccatgactgttgtcagatcagcttttaaatggtgttggcagtgaaatccccactctctccaaatgcagtccgtgttgtggctttaacatgtggcccatagttgcatcctttgccttgggtaatgtgggggtggatttccttggatcctctaggtgtacttctatgtccaatgcaaacgtgagcaagcttcttgcagtgtgtgcttgtctatgcattcgtgtatctacctcattgcacttttctttctaaccacatgtattcttgcaagggatggagagcagctggattacctaatattctggctgtctatagagatctatccctttaccatattaagaaagaaatactctgtggcttttattagttttttaatacttgctgaagtttttaaaaagcaaatgtttaccattttgctgcttattatgattaactgtatcaatcggttgtatcatatccactcttggatttacagaacaatccccaccagatcaccagaaagatgggtgggcatttttctcccatgatattgcattctgtgtgcttgattttgtgcttgaagtggcatgacacctgccctgcctgcagtcctaggctgtggccctgttgtatgccacgtgacttgccacctcacttctggaccacactaattaagccaaccccagacacctgacccaaaggcagcaacaagcagtcagacctgattgaagaagatggacttggccttttagggctatgaaaagcaaaagaggaaactgatgtatctagttggtattggaggcatggagggacgcacaaggtatttcaaggagttgctcctggaagtagaaccaaagagatcttgctggcctgcccagagctgcttgggtcctaccatagcaggcctggctgtatgttcttggattgctggcagctgtcttcatcagtctatgtgtgtccccagcatagacgcctcccctcccctgcaatgccgttagccaacttgaatgaaccttgtgcttttttttttttaatttgtcaagagccaattgcatttgacagttgggctgcttcccgagaagattctcattgctggcttttctcacattctacccatccagaattcctggcctaaatccagttgattgacatgaacacctatttaaatgtggtactgtactctgttcactaagatgggtataaatctatgccttttaatttctgggtttaacccatgatctgtatgagtgtagttccttttctgaacagcatttgactcataacacgagctcattatagcccattttattctatttttggaagtgttttactattttcagcaaacccgctagattaggggattggtgacacctctattcctagtgtacttacattctgtagttcacattacgttgatttgagtactttcaaaaatagaagtggtatatttgaacatgatcctcagtgctacttgcgtatctctgagaatagtagttgtgtcctgcccagtttgtattcagttttagaggcattcttgttcttccctagtctgattctcttgttgttttatggcactcactataatcagccttgcactagagttgtttgtggacttggcttctcctccccttttttcagccttccccaa

SEQ ID NO: 35848 - DNA, 1147 bp, Mus musculus
gcaagttcaccagaagttaaggtgggagagcctttaaagagcctttcaaaggggggaagttttatggcacaagagactggttgagactgtacttcctctgtggccagtgggaatcttgttaggctgtttgactcttgaaaaactatgacaaactatgttggttggcttttggggcctcaaaggagtgtgaggaagtagaaaatgatatctgcctcctttgtggctgtattcttagttacataaacaagatgaaggtactcttaagattattcttctggtaacgccccacccccaaggcaccatcacctactgtcacctgaaagggagatgtgacacagaccctgaaatctctttctcttataagtcaacaacaggacctgttctcactctgatggaggggcaagtgggttggagagatacaaagtagatggcactaagcaatgttcactttcatgaagaccttaccccacaggcttttccttttgagttccaagaaaagaaggtggcttacttggtcacacagtgagcatagcagttgttgagcacttaaattgattcagagcctctgcatgacttgtttataccaaaaactgctcctgtatagatttatgaaattaattaaagccccgaagatgtctttttctgtgaccatgtttgcttagtaatggcaccatctgtttgtctggctctgttggtaaattcatatatcaaactacaagagactctgccttttatggacacagatttctgattttgtgtcaaacctatttcatggtgcagaatccctgggcaactagcaatgtgcgtgcggttttcattgtgatttcatctcccatgtcagatgagtagtctgctgttgccatggtgaattggtattatactgtgaccttgattctgaacagaaatgtacgtcgccttgaccatgattacacaaaattcgttgtctaggaaacagtgcagttccgggaacaggaagagccagataattcttagctataactggaagccacacagggttaccttgtactcagcagtgtctcagttttcctcagggggcctctgggcttcatgtttccatgtgtgacacaaattgagagaaaggggcaggagcagtggtaggaagagaaaagtgaaggcaagaatagga

SEQ ID NO: 35849 - DNA, 1501 bp, Mus musculus
gctcagaaggtccatccaggggctccctcctacctcagacatccaagtcctagaggcaggcaaggtaagcccagggcctgtgatttactgtaaaagtagagtagggcccacaaaagattttgctcgaccttaaaccaacccagtccctcaacttcccaaggagtcctggccaccaccaccaccaccaccttccattctagttacctaggtatccatgtgccctttaccatgacagtgttacctccagatctagtcctaaactgttacgacttagtttgcctaaagtagattgctgagggtccattttcagagttaagggtgtggcctagaatctagctggatgatgcagaaaagaggccatcccaacatttccaggtaccttgttctcctaacacaggcagcccaccctcatttacagtctacaaagactgctctcttccatgggatggtcactctgatctgcctcatagcaaagtgacctagcatagccagagcattcatctccacacacctcatccattggttttgtatcaagcaataagataaattaacctggaccagtagaggttctggctgcccactcaaccattgcacatgcatgagcacaggcatgtgcaggaagctgaagtgctagtcaagcctttcttgctcatataagctacttgtctgctttctcaggatgaacataggtaggccactggctaattgttatctagatgtatgcattatttgagcaggttgttttcagagacatccccaaatccagcaacaggagccagtgggaagaacagaagacaagggactggttggtgttcactttgtgactgtcagatgattaatcttcatgggcaaaatgacatggacctgggaggggattgaccactgtttcgatgttccatttatgttattcatgactcctattctacttggtggggtattctgtgttatgatttctaatgacctgtaactggcctttgtcaataataggacagggccatctcacagtatgtgacctcttgaggtgatcctccaaagtaaaggagtattgccagaagccattgtcttgataagatgaatgtcttggatcttgacaaagggaaaaaattacaaggtgcccccaagttatttgcaggaggagtgcagtcttggaactgcagcttctagtggctatggtgtgttcctgactagtgttttgcctttttcaatggtttcattaaatgtttttgtttaataaaatttttggatgttccaactgtgtctcaccacttccttgggcagttggggatggagagaacttttatttcaaaggtgatttgttgttcagtttcactggtctaatttgggcttttgaaaatgttttgccagcctgactgaatggcctatgactaatcccagtacttgttaaatgtgcagttgtgatctgtttagggagttgcatgtttatctgggctatagctacatagtaagactctattgttttgtgtgtgtgtgtgtgtgtgcg

SEQ ID NO: 35850 - DNA, 1195 bp, Mus musculus
ctatgggttgggtaggagctgcaggtgaggtgggagctgcaggagagggaggagttttagaggcaggtgaagaggggtctgcaggggatgaggagtctgggagtgacgaggggtctgcaggggatgaaggatctgtggacggtggagggtctgtgggtgaagcaggagctataggtgaggatgaggcaggagctgcaggtgaagcaggaatgtcagatgaggagggagctgcaggggacatgggagttgcagggatcataggagctgtaggattggcaggagctgtaggtgaggcaggaggttcgggtgaggaaggggcctttgatgtggcaggaggggcacatggggctggagcctggacccagcagtggagccaagccctgcagcccatcctggaaaacatggcctaccaggagctgagacacttctctgggatggaagagcctggctgtgggggtcagtctttcgagagctggctggactatgccaatgatatgctatacctgtggcgccacatatctgagagggagaggaggcggcgtctggtggagagcttggagggccctgccctggatctcctgtgtgagcttctggaacagcatccagacacctctgctcaggactgcctggctgcactggtgcaggtatttggcaacaaggatacagcaatgacagcgcggctcaagttcctgacttgctcccagcagcctcaggagacgctgtttgcctatgtgatgcgcctggaaggtctgttgcagatggccatggagaagggggccatccagcctgcaatggtggatcaggcgagggcccagcaggtgctgatgtgggcccggcccaaccagatgctgcagagcaacctgagaaggatgaggctggagaggcggccacctggatttttgggactgctcaggctcgttagggagactgaggcatgggaggcagctctggctggaaatgcggaggttcaggagggggaaggggtggaagtacatggtgggcagctggatgtggtccaggctgcccttgtcagtgttggggttgctgagcctgcccctgctgttagagaggccttcctagccagtgaagatgctggccaggctgctgctgctgctgctcagcaagctgctggcgctgctcctgatggtgatggtgccacaaaggcagaccctgattctggggaggccaaggcctt

SEQ ID NO: 35851 - DNA, 2105 bp, Mus musculus
aaatgaggttgggaagaggggtgggaaccgatggagtcctgagataagtctagagctggctgtaatgagaacgcccaaaaccatgcattatatgtatgggtacaagacgaaatctgtcaggtcccatttttttttgacagaaatctttacgttttgttgactcatctgaacaacacagaaagtgtattccatcatagctcttagagaaactgtctagcaaagtatgctaggcagtgatggcattaccagggcagcttggagctaacctcagctccttgccctacactctactcaccaacacatactgatctccatgagaccattaaaggttcagatgtttcccaagtgccatcagtagcaagttcaggaggcagaggagaggggaggtggagtggggggctggggtgctcaccctggttgcctgccccgttttaggccctggtcttggtaaacaataagatctccaagatccatgagaaggcctttagccctctgcggaagctgcaaaaactctacatctccaagaaccacctggtggagattcctcccaacctgcccagctccctggtagaactacgaatccatgacaaccgtatccgcaaagtgcccaagggcgtgttcagcgggctccggaacatgaactgcattggtgagactagtctgtaccttagcatcaggcataaaggagacaggtagaggatatctctttcagccagggcagctgggtccatgtagtcatggaaaagccctgtgtgcctcagaatgttccagatgtttgttttgggacatgaagaaaaagactgtggtggctataaaggctcggttgaagaaagagtctcaaatatagtctaaaaaagaccagtatgtttctggaaaaaaaaaaaaacaatatgggtaaaaggaaggtataggacaccgactggactgagagagaaagggagaagggcagtggaccaccacagcagcaaacgttggatggctttctgggtccccacagtttcctcttgcttcccaactcccaaagaccaagaatagtggcagaggccttgagctagtcatgcagaacagctggaatttgtagttagcggtgcaaattcacaacctgctttctatggaagtgggaagagcaagcaatcagcagagctgcagtccagaaaagaacaggctttggtggagattggcttcagggctcacaggacttctctcctagagatgggcgggaatcccctggagaacagtggctttgaaccaggagcctttgatggcctgaagctcaattacctgcgcatctcagaggccaagctcactggcatccccaaaggtaggagagtgtcaatacccaacctccaaaagcattgatgggccttgcacagtgtacttgagcagagaatgggccttttatctgccccagaccctgcacttacctcccagcatgttctcttctgggtagatctccctgagaccctgaacgaacttcacctggaccacaacaaaatccaggctattgagttggaggacctacttcgatactccaagctgtacaggtggggttgaggcagcccttgggggatgcagggatccattagcaaatggggcaggttatagggtggcacccaggtccctgtgctctatcccagagtcctcctctcccccagcctctgacgacctctaattcatttaccttcaggttgggcttaggtcacaatcagattcggatgattgagaatgggagcctgagttttctgcctaccctgagggaacttcacttggacaacaacaagctgtcccgggtgcctgctggcctcccagatctcaagctcctccaggtgagagctggttctccaagactagatggggagttgtagaaggtccattctctgcaccagcctcttaactgcctggatctcctgtctccctttataaaggggcacagggtagagagcagaataagacctagattcacttttgggtctcatgtactcatccaggcctcagtggaacagtgtctgcttcgtgtttgtggttggaaaaggggagtctccttccctgacttagcttccaaacacatgagcaaactaggtctttcccaaccttactctggacct

SEQ ID NO: 35852 - DNA, 1473 bp, Mus musculus
cagcctcttcaacaaccctgtgccctactgggaagtgcagcctgccaccttccgctgcgttactgaccgcctggccatccaatttggaaattataagaagtagaggcagtggttgccaccatggtggccttggtgagagtctctgaggaacatagccagatgaagaagcaacacctttgttccccaatattaactcactgccccaccacagcttccccctgactcctaagcatgcatatatgcacatggcctggccctctcacccattcccctcaacctttgaaatttaacattcatcaaccatgtccactcagagactccctataaatctttcttcttgctcatcctgaaactcagatgtttttggcaagaggggctaggaaagatggatagagcacactgccaccgccattgttccatccaggcatgtgttcctcctcttccttgctcatgtctgacttccagctctcctgggctctgcttgctgcccttatcctctggtgttctctcttcaacaagttcactacctgtcaatcccagctacaacctggctgtactaactcctggatctttccctctctccaaccctgttatgcttcctgacacttttcttccttctggagttattgacctgtccccttccatctctggacctaggtcatatttctccatctttgtctctttctgtatctccttgcctatatctctgtctgtctctatttctgtctctctgtctctgtgtatctctctatctttgtatctgtctctctctgacaacacacacacacacacacacacacacacacacacacacacacacacacacggatcatctgccccaggctgctttctgcttcacaggtctctagccagtccctccacaaacaaatatggggcaactatcttcctgattgccctacccagaacttgaccccccaaccctggaggaagctggaaggtggaggcccagaatcctgtccattttgtccaggaaagggttcatactctgctatcaagacgaggatcaaggagcttcctagcccctggagaggctcagcaggccatcagagccgccagaaccagtttgcattggcccctgctctctccccaagatggctaggtcccctccctcacccctgggtccctgatgtggtaggaggtgatggtcagttgcacccagcaagagggagtgctgcttatgaggtcagttgtctctcaattaaagaaacactgtgcaatacgagtctgtgtgccagttctttgaaacatcactgggcatcaagagaaaagcagaggtgaaacaagggcctcctcaggccacctcaaaggctctgcctttccatccccagtttacatcattgtgcttcctcttcactgttgcccttgcccgtagaagaaggcccctctcaccctcaggtccagaactataaaagcacatcccaaatgaccagacataaggcctaggccctatct

SEQ ID NO: 35853 - DNA, 1656 bp, Mus musculus
cctgggggggaagcgctccggggggcggggcagtgggggaccagagtccaccgtctcagacccaccttccttctttactacccctaccagtgatggggtctttgagctggaccccacataaagccgcatggagctgataggctggtccctacttatgacccctagtataagcagggatgggatgcagccataagcagggagaggggaaaggggaaggggggagggaaagcgcaatacctcatgtggggatggtggagcaaggcaggaacagagtagaaacctgccccacccactcaaggccagccccagattctatttcacgtgcctactggtgggcccgggcttcgggcctgaccctcaccgctctagagcggggccatgctccagaacctgcctcgtctgtgactgttactttcttttttcagggtgggagtggggcttcctatccaagagaccattccagattgctgcctgggccctggcccttcttgctgtttcattttcaggaagagtgtatcattctttgccacaggaacctgctcttggctccatacctgtccccgaatgcccacctgtgggagcagacctggccactttgactcgtgtagactccttcctgcttctctcactagggcttagacttcttggaactgtagggtgtgaacccagagacacaatggctgctctccgcatccacagggacagcctctctgggtggctttttgctgggcagtgtcacatgggagggcatgggcctgggagccaatgggcgagatcccagccacacatctggtgccctgactgtttctttcctcctcccccagatgtcttgacaggatcactgagactctttgtgactgagggtggtcaaactgccaccggaggagatagggtctcagagctagagctgagggggagggagggaaagatgaaggcctcaattttgctactgtgagtctcacacagccactgttggtttggggggcagggaaggggccaagctgcagacacacatggtcattcattgcagtccacaccccgttgtagactctgtgtgtgtgtgtgtgtgtgtgtgtgtgtgtacacactagcccactcacatactcagcctggagctggcaatacctgtggcagcaggaccatcttgtctttgtttttgtaatccacatcataatcacattctttcattgttactcctgaataaacagtttatttaaggtactgaacagagaggttgttgcttcttggactcctttgggaagggagggaaaggaaagggaagcctgcccttcaccgattcatcgttccccatcgatgtacactgcctattggctaccaggtctctcacaacccatttgaactcctaacacacacttcaggaagctgggcacaacagtgagccagacatgaagaaactgcctgtttgcagctgcatttccagaggggaatgtgatacaaagtgtggccagtaccacagagtggggaatcaaatactccaaattcagtcgtgaagttgtaagtgacgcccaagctgtgagtcaaagttggtggcctgcatattttgctgagggtgcctaggacttgagggaatggacatgggctatgcatatcatacaatgtggaatcaaggctacaaaagcctgggcaaaggtagga

SEQ ID NO: 35854 - DNA, 1205 bp, Mus musculus
acttggggctgggccggggccgcgggcctcaggccccttgctccggccgccgcttgcagacagtgggcttccgatgccacccgcgacgcgctagggtgagcctccggcagggcgagcagtcctcgctgcagccgccaccgccgcccgagccgcgggcaggagtctcgggagccgccgccgcccggccaggctccaccgccgcccgcgcgctcccgggcccccgacacacatgagattcttcaggctcactttcaagtgcttcgtggactgcttctgactgcgccgcccccgccgtcccgcacccctcccgcccacccgtcgccccgtcccccggcccggccgcccccgaggcccccgggcgggcccgcgctttcggggccctctctccaggtgccaccggagccccctcgcccgcccgccaccctcgaggcgccgcgacccccggcccggcctcacggccccgctggggccatggcgaaaaagagcgctgaaaacggtatctatagcgtgtctggtgacgagaagaagggtcctctcatcgtgtccgggcccgacggtgccccagccaagggcgatggccctgcgggcctgggggcgcctggcggccgccttgcagtgccaccgcgagagacttggacacgccagatggacttcatcatgtcgtgcgtgggcttcgccgtgggcctcggtaacgtgtggcgcttcccctacctgtgctacaagaacggcggaggtgagtgccttgcccctgagcatcctggcttttcatcagggaccaattccaaccccagcctgccacaggcccaccagagcagtggggcaaagtccagagggtagggaggcccgcccaaagcgggtggaggccatggtgccccctcaccaaccaagcgttctgtgacccagcacagcggcctccacccccctcaccggtcatgtgcctggcagtgtggaagagaggcaatcaagggtagcttccagatgaactgaggggctgcctctcagacttccagtccaaactgggagtgattggccactgaggtgggaagggaagccctgccccccaatggagggggctctaggaggtgaggagccctagttgccctcatgggtcaggcacacaagtgacacattgtgtggacccccccacgtgtacacataggaatacgtacacacacacaatgggccactctgtccctcccccacac

SEQ ID NO: 35855 - DNA, 2031 bp, Mus musculus
gcatgtgacccatgggaagttcaacatgccctcctctcccacagcgatggcagcacctgacccagcctatctggggcctccatcacttggaatacagagctcaggatgcagatgtcaggggcctgaccaccctgactcccgtgtccgagagcagcaaggtcgtcgtggtggagagtgtcatgtaacaggcacccccagctcacatcaccagctcatcctttggtagccatagcagccccaactttagcccccactcatccctccgggggcttgcctttccttgacagtttgggggtctgcctgggggaggggagggagcaccatgagtgctaacaaaaataactttttccatttttaataaaacgccaaaaatatcacaacccaccaaaaatagatgcctctcctccccaccccacaactaagctggtatttgcattgcttccaggccctacctcctctccttctttccagtgcccaggacccatctcctagccttgccaagcccacctgcctgcctcccaagctctgctctgtaacatacctttgccctagaaacaacagtggcagcttgggtaacaggagaggagggaaaataaggtaggacaggaggagaagagagggacagtggaaccaatgtgaatattgcagctgaattagacccttcctacccctattctagaagctagagagccagtcagcaatggaactttgtgttcctgcgccaattgccaccaatattaactgtgtgagcttgggtctgagtgcacacccccctctgtgtgtgtgtgtgtgtgtgtgtgtgtatgtgtgtgtatgtgtaggtctgtagatctcttatcccttagtgaaggtgaataccagaagtaaacacagcctctgggcaaaggaggcttatattttgcacattttataagaaaaacttgagagtgagacttctgcttgtatatttctaaaaagcccccaccatctccacatttccactcctttccttcacatcctcacctttcttctctgaccctagccaaggagtgtgaatttatagacttaattttcataggcaaaacaaaagcttcaggctgttgagtatatatatgagtctgttgtatggatgttctgtatggtctccagccagagactggagtgggaaagtgggagcctcaatggtgtccccacactgctcctttgcctctaagtctgtgggacggaaggctgtaacactgttccagggaatctgggtctgctcacctgacatgctcagacttgcccacacccagctccctgggcaggattgcagggatttcccatggacaaagcccgggaaagggatcctgggcatggctcccacctccaagctaaaaggctgatgtactttcgacatctcaagtcttccgtgtagcagcttaaacccacatctgtgtcccatcaagcctgaaacagccaagtagcccttagaaaggcttccttcacacagagctggactaagccagagaggtggggctgggtaagggtgcaagcctttggggacattcttactgtgctaaaaaagccactgcaaacatagcaataaaaacacttcattttccaaaattggctcctgtttctgcttctctggaagaggaattaggtggggatgcaggtgtgggaaccttcctccagctccagccttgcattcactaaagcccattctgagggattctgtacctagtaccatgtcagaaactggaaatagagcaggaaaggaagcctcaaccctctagactgaagagcatggggtgacagtaagttcaataggaacaaatgcagcagagcgaggctgtagctatgagttgttccaagattttttctaaaccaaccaccatggctcatgcctgtaagcccggaacttgagatgttgaggcaggtggatcaagagagagagagaagtatgtttgtgtgcaagtggccttccaagatctaaaagtaaatggcacactaggatcacagataacaagaggccagcatctggacctgtccagtgacactggagctggg

SEQ ID NO: 35856 - DNA, 1315 bp, Mus musculus
acgtgtccatacatgtataatagacgtcagaggataaccttgggttatcactcctcaagagctatccattttattttataaaaccaggtatctcatttgcctagagcttacaatgtagacttgttacctagctataggaatctaactgatctgcctctccagctctgagattacagaatgctctacatctgactttttatgtgttttgggattgaacccaagtcctcatacttttatggcagatgctatctcccaactcccaaggatttgggttttactggaaggtaattgtttaagggccctaagttgggacttaaagactagcctgctgtgtgttctggaggtggccttgctcccattgcagtaagagagagctgcaggggactcctccaactgccagtctttctagaccctgttcatttcatttgggggggtttctttccttttccaggcatcagtacgtggtccctcagtcaagaaggaggagtaaaggcttggtgtttccctgcctgccgctggcttctacctgacccatgcttactgcttccttggagcccagactatccctctggtacttgggtttattccctacttccccaattttcttccatggcttatagatcattattttggcaccattacacatactgctcttataccaaaagggacctgattgttgtttattcagagtacttttgccactgttctgcctggctagggcactttccactcctggaagtgtagaaaagcactggtgacctggcctgcagtttgaacccctttttattttgcaatgtaccctaaaggaggctgctgtgaagcaggtcaactgttttatcctgaggggaataaatgttgttatgttataaggtgtttgtgtctaactgaggctttgggaatggttctgctgctcctctttcaaagttaaagattgcccaggaaggctgcagatgctcagtgtggcacttttattaccttgagcttcttcttattctctgaagaccagactcacacttgctgtcaaagctcctgctctctgcctccgccctacctccccccttcaagtcaggacaacgctgctttatggctcttggggagtgtctgtcttgtcagtctccctgggagttggcaactgtctgggaagcctggtaaaccagcaggacttcctggtgccttctctgagttcctattcatcacattcaggacagatagaatgtggcagagtgccaccagtcactccctgcccaacctcctcctgaaggtttacagcatgacctctgactaatgctgactgggaaaggagactgtccttggc

SEQ ID NO: 35857 - DNA, 2016 bp, Mus musculus
gaggacacagcagaggaagagggtattaccattgatgtctccatatgctggttccagtggcagttgttttgttttgttttgtttttatgagaatgactctctaataacagagacctgtgttgaagaaggcccttattctttagaagttagttagcccctttatgaacatggggctgatggatcccttggtattagggaagaatcagagaccaatttgttggtctatcagaggatctgtagtataagcaagctgggaaggagagtgatggtttagagattggtggggtgcagttgaatataaacaaattttggagtcattggctgtagtgaagctacaagagtcagggaagagaaggaatgggtgtggttctttaggttatctgggctgagagctccaggtgacagcaagttgagttactggttagatgggtaaacatagagccattgaactttattggtgggaaagtaggtccagggactggggtaagcagagtgtaaatgaacttgcagcaggctttctggaccttcaccttcacttccttctgaataacccaggtgcttggcactttccctagggagctgccgaggatggagacaagttggatattgggaatactgaaatgaagttagaggagaacaagagcctgaagaatgacctgaggaagctaaaagatgagctggccagcaccaagaaaagtgaggatggctgtcctattacacccagaagctccactgtccattgatgcccccatggatcaagtattaatagcacacttcacgtgaaagctcaagagttgggtggaaacaaacacatagtactctgctccttcacacccaaatgagatcaaacaagttcactcctagagcatctttgagtaggccttggagaagccctaacaaatgttgtgtatgctttggtagtgcttactaggggtttcccattaagacaggcaggcaagggggaggcccaagatgccttggagccgagaacaaaaatgtgtaagaaagaatttgtgtgatccaacctctttcacttctagattaatttcagactcatttggcactgtaggtgttggccaatgtcactaggggtcttaatggtgggattttgctcattgcctctcactgccagccagttaaaaggttaccccttctgggaaccgttagtgtccttccatttaaaggactaagggggctaatgctgactttttattccatctagctgttgggttatccatccttacaactctccccgagtggtttgtaaaggcagaaacattgacaaacattggaaccttatctgtataacttcttttgcgacagatttacagaagtttcccatgttttaagcaggtagggtttttcttccctaaataatctttttgatctcttcctgtattcatttgtattgttgttagaacttgagaaagctgaaaacgaggctctggctatgcagaagcagtctgagggccttaccaaagaatatgaccgcctgctagaagaacatgccaaactgcaggtcagtgtttccctttctgtaggtgcaagttagggtcagggtcctacagcacagttctggggtactaaggagcctgttgcctcctttgttgttgtgtgtaggtttagagcagacccagctgtcagaacccttcatgtaggaggtgtggcatggtactagatggtgggctaaaacctgcaaagttcaagggcagcccttgtcagtagattgactctctgctctgagcctttcctaccttaaatccagtctcaagcccctaaagaggggttatttaacattctaaaacatcccagctgtggtgtcctatttcattaggatcatacatgggaaagctgagtgtggtggccacacccaaaacaccagtactttaggaagctgagactggaaagttgagaaaattctaggtcagcctaggctacatactaagaccctgcctcagaaaacaaaaacccctcaataatgtagagacctgcttttgtccacctctcctgtgggat

SEQ ID NO: 35858 - DNA, 1191 bp, Mus musculus
tgaaattaggtcatctggaaagtttcttttcattgtactagtctgggggagtagagatgacaagtatagggcccagcctaaaggtgtttatagcctgataggacagatgactgaatatcctgagaaagtgaatacaagagcctgtcgtgttttgggggctgctgtgggaacactacaggctacctccccaataggaaagactttccggagggaggtgatggttgaggcattactctcacacagtggctcaaccacaggagcaactggtcaaatttgtcagctctggagtggatgggaactctgtacagatgccagcgggaagaagcaccaggcactgaccatgggatggctagagagcatcctctctaaacttgacaaggcaggaagtgacttgtccttctgtaggaggacagagcctctaccacagaaacacacttgatagcaggttctgatggagtaagggaagacctatcttgatgggctatgtttggagtgtttgtgttacatcagaatctgatgtttagtaggttgttatgagtctggtggcaggtaatccctttagggaataaagctagctggaggaaaatacagactgcaaagtagacacctgaggaagagtttaccagatggaagacctcttaaaaccaacttgtcagtagcagcatatgttacagagtgcacatcatgtgaaaactcaagtgtttgaaggatgaagcagttagagggcaaaggcagggaaggaaagaagacggacttaagaggaaatggcaagaaaatgacccacaatcaaccctggatggattagaggcctagctccaacacaggtgatagaaagaactgtcagtgtatgtgttgggggtgcaattagagtgtttgccattggtggccagctagggtgccctgggacagaggtggggaaaatgtccatggcggttggccagaggaagaaaaatcagggctaggttggcaatgtgactgtcgtgttaatggctgcaaatcaaatgccagaactgtgagcagacactgttcagactttggtttttgtggatgctatctgtgagtattctggactatccaggaaaccctagttcacaatatctgaggaaggcttacaaaagcacggaacagagttgtcctgagactgttgttcctgatgggactgcctttctagttgtggcagtcatttaccag

SEQ ID NO: 35859 - DNA, 1127 bp, Mus musculus
caccaggtgctgtggaacagctatgccctatacccagcattgatgtggtgagactctgtccctgtagactctagcttccccactcctcaaggtccttgcctccactgtctgatactcccccatgtcaaactgcttgcttcagactcgcaatccctagtagtttggtctagacatttttaagtatttggctgactgggcaccaccactgcagagtgggatgtgggtttggagaatcctatctgccatccttctttgctacagattgaacccctgactggtcccccagaaggtggcttggccatcaccatcctgggttccaacctgggccaggcctttaatgatgtgcgaaatgctgtaactgtggctggccagccctgcaaccctgacccttctctctaccgcatctctgctcggtgaggctcctcagcaggctggggaggaaaggaatgctatccagagtaggccttcaaaaactagtcacctgccagtagtggtggtgcacaccggtaggatttgctgaaggaggcaaaggcaggaggatcacgagttcaagatcagcctgggctacacatttcaagccgggcgtggtggcatatacctttaatcccagcacttgggaggcagaggcaggtggatttctgagtttgaggccagcttggtctacagagtgagttccaggacagccaggattatacagggaaaccctgtctcgaaaaacaaaacaaaacaaaacaaaacacctagtcacccagaaagaggggaggcaaaaaccaaaaccaaacaaacaaacacaaaagccgggcagtggtggcacatgcctttaatcccagcactcaggaggcagaagcaggaggatttctgagtttgaggccagcctggtctacatacagagtgagttccaggacagccaggactacacagagaaaccctgtctcgaaaacaaaaccaaaaaaaaaaaaaaaaaaaaaaaaaaaagaaagaaaagaaaagccaaaccaaaccaaacagaaaaaaaaaaagaaaaagaaggaaagaggatgtgaggtcctgggtgagaacacaaaagggaaagaggcagcagaggaggaacaggctccaggcagcccctggcaggctgttctaggctc

SEQ ID NO: 35860 - DNA, 2546 bp, Mus musculus
atgccaacgtcatccactgtaagagcctgccaggagtggtgacccggcacaaggacatagacatcctcattgtacgggaaaacacagaaggcgagtacagcagcctggagcatgaggtaggcaaagctacttgaccctcttgggtaggtggcaatgattatggccagggtcagagttgaggagagaacttcagaatcaaggtaaggtactgccactcaaagggctggaaaagccagatatacttagtaataaggctgcatcctgtagtgctcccatcaagccttttgtcccctggcctcttctcagagcgtagcaggagtggtggagagcttgaagattatcaccaaagccaagtccctgcgcattgctgaatatgctttcaagctggcccaggagagtgggcgtaagaaagtgacggctgtgcacaaggccaacatcatgtatgtttactccatactctcctgtctactttgagctggaagggccacacacagggctatgtcctgttgttcctgaggttctttgtcttactacactgcatccataggggagggagatcgatgggattatgcttgtttttctatctggagaacaggtttcaaactagtccttagggttctatgagtctctgtatgccctgactctccagctgactgtagtgagaagttaagctggtgtcttatacccccatcgtctaggaaactgggtgatggactcttcctccagtgctgcagggaagtagcagcccactaccctcagatcacctttgacagcatgattgtagacaacacaacaatgcaggtaattagcccagctggctccatagccttctactcacccttggttctcatggcttctacaactcagctcacttctttcttttcccacagctggtatcccggcctcagcagtttgatgtcatggtgatgcctaatctctatggtaacattgtcaacaacgtctgtgcagggctagttggaggcccaggccttgtggctggggccaactatggccatgtgtatgcagtattcgagacagtgagtagccaggcacaactctgctgtctttctcttatagtggccttgtgtcagttggtatactacagtgttgtgcagccattggtactgcttaaaggctaaagttttctaaaggaaacccagacccacgagtatctccctgaagccctaatatgccttcatttgctgtgtctgggatgggcctctattggatatggtacatgagtagaatcatctaccctgcattcttatattttcccaactacttcctccttcttctctttaccaggctacaaggaacacaggcaaaagtattgccaataagaacattgctaacccgactgccacactgctagcaagctgcatgatgctagaccacctcaagtaagtgggttgctcatgtctgatcatgagtcctctgactagcccctaagcactgagaatcaaaagtttgttctcttcatccattaggctccactcctatgccacttccatccgcaaagctgtcttagcatccatggacaatgaaaatgtaaggctcttcttgtcccctccttgtcccacctttagtctcccctcatctaccccatgttatattggtctgaccaaccctatatgctttaggcagtgactaacactgtctgtgacctataaaggaagggtggtgtcacatagggtaaggtttctgggactaatctagaactattggcctcctggtgctagttctttgcctttccaactataggaaaccatgggtagccctaggacaccatggggttatggtagatgttggcctgatgtgtccaagcttcttgttttcctacagatgcataccccagatattggaggccagggcaccacatcccaagccatccaggacatcattcgtcatatccgcatcattaatggacgggctgtggaggcttagctatccctacagttttgctcagcttgtctgtaggactctcttctcactttagcactccagctagcttgggggacaggacccagaataaagccacttctgttccagaacttggccctgttcttcccttactccaagacactggcatttcagttcccactttattaagaaacaaacaggcagttttccccattcaggagcatctagaaggatcacaagtagacaggttgagatatgggccttgccccagcatctcatcctgtcatgggggtgagcacccagcaggatggaagagcagctcccacagggtggaagaagttgcctgctttccctcaaggcaccaagagctagcatagtctctactgtccacagctgcagcaaaacctatggattaagccagggatgctggaggcagtcggcagcactggcccgcttctcagggatgtactccatcatgggcaacaggaaggcactgaactgtgtggcctgctccaggggccactcatacttctccatgagcacctcatataggccccagtgcttgaggttggggatgtggcgcagctctcctagagggtgagcaacattaggcactgtccccagat

SEQ ID NO: 35861 - DNA, 1187 bp, Mus musculus
acgcgcacagtcacaccggttcttacgcccccttccggtgcctagagcactgttccgccatcttggggaggggaaggctgagaaggagggaagtgcgaccggttgggaccctggctagggaagcggacacgtcagtgccgccagcgacgtcaccatgcccgacccagcccgccgacgcacgattgggtgctgaggccgcttacgcgtcgcgcttcctcgtctgctccgcatgtccagggtggcttgctctcttttcccctcggaagagaagaggcgatggcggcgatggcatctttcggcgccctggcactactcctgctgtctggcctatcttgctgctcaggtagcggcctggccggagcttgtttcggggcgcgcccctgctgttggcaggtggtgctggggggaggaagggtgtgcgcgaggtggggatctggcccttcccggggctcgtcgctactgacgggatcttcccccgatgggtgttgtgtcgtggcgaccaaagcaccacacacacgtttacccgacagccaggttgcttccttgtctgcttttgggagaacccccaaagcagtaccatgctccgaccaccagctccagcagggaaggtgatatgtatgtccctggttcctgtgtcaaaaggtagtcgcacaagagcagtgctggcagctacgaaccaatgctgcataggccaggcttccccaagagaaacctaagagagggaggcagatcagagtaagggcactaggcgagttagatagggaaccgatgaagtgagcaagggcttttagtgcccagagcctcgactttttgtgacgccttggtatatcccaccccaaagttcatagcaaaattgaaccgtgcacagacccgttgatatttgtgagacatctgtaacgtggtagtggggctgagctcaatctggagtgccggcatgtgttttgaaagatgttagcacctcagacctgagagcctgaactaaggacgatttggtttctgtacatacaggtagcctctggccatcccttctacccacccctcagagaatccttcagtctgttgctagcagtgtcttaaaaagacaaacctggctgtaacatctattaggggttccatagtgtctacagggaaaggcccagctgagcaggtcacagaagggttggtggaatatggccttgagagccatt

SEQ ID NO: 35862 - DNA, 1184 bp, Mus musculus
cagggttagagaccaaagatttaagcactgctcatggtggtattgtgccagcactagcagagtaatcccccatgtatctgctatgcctgccccttaccaaacacccaaccaggtgtcctggagcctggagcacaagagcgctcatgcgggcacctatgaggtcagattctttgatgaagagtcctatagcctcctaaggaaggtgagtatcatctggaactcctctgaggccccaaggagggagggcatgccccatttctgaagtcctctttaccctggtcattctgtattccccttctgcaacatcagtactctaggggccaggacaagtggttgtcttcctgcacttctgcccctgcttccttctttgtctcttgctcatttctcccttttcttggcaacctacccagcacttcttgaccccagcacctcccttacaggctcagagaaataatgaggacgtttctatcattccacccctgttcacagtcagtgtggaccatcgggtaagtgcccttgtcttggaagcagagaatacagggcatacctcatcttttggggttgtctaaggaaaagctctgatcctctgcagcccaggttctgggctgctgttgatctgtgtgtcctgagaacaagtgattaagggtgactgctccactccctggcactcccctgagctgtcttttggtcttcttctttttttttcttctctctctctctctcttttttttacagggtacctggaatgggccttgggtctccacagaggtgctggctgcagtaattggcatagtgatctactacctagctttcagtgcaaagagccacatccaggcctgagggcagcaacttcagccgtccattgcttctttcaataaacagtcactatttgacatgagtacattcaagacacggggctcctgtgtctatggggaaagctggggatccagctgcccttgtctgcctggacagcagatagtaattctgagcagagctatattttccccaatgtcctctgttttctctgtccttgtcctgtttgtcaggatatcttgggcctgtcttctcttttcttgtgtgtggcctctaaaataagaccatcttggctgggcagtggtggtgcaagcctaaatcccagtactcaggaggtggaggcaggtaaatcactgagtttaaggccagct

SEQ ID NO: 35863 - DNA, 2568 bp, Mus musculus
gaagatgcagcagttgcgggagcgctgtatgaaggcctggctgctggaggaggaaagtctctatgacctggcagccagtgagcccaaaaagcatgagctgtctgatatctctgaactgccagagaaatcagacaaagatagcaccagcgcttacaacacgggggagagctgccgcagcactccacttcttgtggagcctctgcctgagagcccgctgaagcgatctggtgctggcaattccaacttgaatcggaccccttctggccctcctgtcaccacccacctcaagggggctccttcaccagggagcccagctaagttccgatcactctctcgggatcctgaagtgggccggagacagcacacagaagagcgtgtccgccggagcaccaagacaagtgttactctggagcgtgtgggccctgaaggcagcccttacctctccaggcgccatcgtggccaggagattgagcagtaccacagctgtgtgcagttggccccgccacgcaccctggaggatctgggccatggctccttgagcttggctagtggtcctcgggtgggtggggtggcagctgcagctgtcgaagcaccccgcatggagtggaaggtgaaggtgcgaagtgatggaacccgctatgtggccaagcgacctgtgcgagatcggctgctgaaggccagggccctgaagatccgagaggaacgcagtggtatgaccactgatgatgatgcagtgagtgagatgaagatgggccgctactggagcaaggaagagaggaagcaacacctgatccgagcacgggagcaacggaagcggcgtgagttcatgatgcagagccgtctggagtgtctaagggagcagcagaatggtgacagcaaacctgagctcaacatcattgcgctgagccaccgtaaaaccatgaagaagcgaaacaagaagattctggacaactggatcaccatccaggagatgttggctcatggtgcccgctcagctgatggaaaaaggatctacaaccctctgctctctgtcaccactgtctgagctgctccagcaggagcccagcccaggtctagaaagcctgaccctcaccctcccttagaatctagtgtgtgtcgatgtgtgtgcttgcacgatgtgctcatgcacactccttacctgtatgttatgtgtgcacaggaccttggtaatagaaagccccaagaagggacacttctcttacgcctagttccttttccccaagaagctatgctaacaaccaacatagaggcatacccataaagggcacctctttgtgtatacacatggtattcttgctattttcttggagacagggaaatcagtgcagagaggtgaggtggactatcctaagcacaagagaatgtccagcttcatgctgagcacgacctctcccctcctaggagctgcaattatttgtagacaaaggcaaccctgaattttgtggtttttcttcttttctgtgcttgccaatagttgttttctgttttgtgggcctgctctgggggctggcagctcctttaggcagcctgacaaaggtggaccccaccgagtgctggctggaaaggaggttggggggaggaaaagagggagggttgggtgggagggaaaggaaaaagatggggaagaataaaaagcagctgtcctggtggcctctaggggctctgccttggctttcaaggcttaaccatggaggcccacctctcttgccagtgactgaaggaaagtgagatcacagggatttggggcacagtatccatgcaaaagaatctgtctatgccatctggagcagagtcactcttctcagtggcttaagcaaggagggccaaacctaatgagtctagagaggatgtggtgggagttggaaggcctgggcccaatgaaaggaaggtgggctgactgagagatgcctagaaccttttccaggtgatggaactttaaaatgtttggtgcctgtcaggcttggtgaagctcattggatgctacaggatgcccctgctccccacctacatacaccccaagaataaagcaagctgcctttttgctgttaatgtggacttgtgttcattgccatcatgctatttgtgctgagaaatgtcagtatattagttcctgaatacccagatttctatagcagattggtggtgagcaagatgccaagatgggtgtgagtgggaaatctaagggcccattcctagaagctgagtctattgctggaaaggctgggtctgggtgggaatacacaggacagtcctgctggtgaatagggagagaatagaatagggagtggtgagaatgggaaagcaggggctagatactagttctagattctttttattgggggggggggtcaagatagggtttctctgtgtagccctggctgtcctggaactcactctgtagaccatgctggcctcaaactcaaaattcacctgcctctgcctcccaagtgctgggactaaaggcgtgcaccaccacgcccggctagttctagattcttttaggagcatttccaatagttttagctttggattctttgaaaaaacaca

SEQ ID NO: 35864 - DNA, 1214 bp, Mus musculus
cctctgcctctgcctcccaagtgctgggattaaaggcatgcaccaccactgcctggcctgaccccaattcttacctgtgggcaagttcctgtatggctgtgtgcctcaatttccccagctagtatgtatgagtgaaagcatttgtttatagtggataagctgatggaagcaccttgcatatatctccttcatggtcaacattgggtccctggcatagcagaggtagaagtaagtcattgttgctgcagcccgttcagttgatccttagacatagaacccctgtaacatccagtgacagaagactgtcttactttattctgagagtttctctagtgagaaagaaaagggaggggaaaaaataaaaacaacagaaaagggctccaaattttgaggacataatagcatgcagggtgagttaggagaggaacagggacaacagtagaggcatagtttgtctttttgcacagaaggaacaggctaagaagttgcagaactagatgccaaaatacttgcttctcataatgcattctgtctgatcttcactaatggttggaacaaataacatcctggttatggctagctgtggaccttgccatcgatttgccaggctggcaggaggtggtgggagatttggctctctgccgctaatatttattgtgcacaagaaaactgaacaaacacccaaagagaatggtttcaggaagttgtctattgaccttataggacattccttcttcctgtctgcttctcaggcaggactacaaggttgtggaggggcagctggcctctgaaaagtcagggagtgggagaatctcagtcaactatgagccagcattacccacactgctgctttggagaagaaagaaggtgctggagcctggtctagtttctaaaggagtttttgtggaggagtcttgtttgtctctgtttctcagggcttgaccccctcctccccaggtttatcccctccgaggccccaggcaagactccacccccaccagaggaagacccttgttcaaatgtaaatccagattaagggatgtaggggtgagtggtggtgggactggctgtttctggagtcttcatttccttctcaaaaactgggagtgaagttgttttcctgatgctgtgagatgggaatttggagaagatcagtgaaagcctcaagttttgtcagtatcagaaggaagtgttaagacctcaccacagaccta

SEQ ID NO: 35865 - DNA, 1221 bp, Mus musculus
cctctttccctcacttcctaagctgtcaagttgtgacatggcctctgttgactctagagggggctatgggatgctttctagggaagaagcctggaggtgggtggaacaggagagagagtaggaagatatttttctagggagagggactactagggtcaggggcagcctgctcagatttaggactaaactgggctagggggaaagggtctctgaccaagcctcctggggaggtactgctctgtcttggaggctccccaacagcacatttgagggcaataggacctttgtcattttacagatgaggaaagcaggcttagggcagagctaggattgaactacatttctacccagtcctatttcttgccttggccctaccacttctcactgtgtcccttcccccagccagcctcagggcctggctcctcttgtctcctgtctggagacttaggccctgtctctttccacccgcttccctctgggctcctggcggcagctgaggcggcacctggagctgaaggaaaagggcaagcacatggttctggcggccttggagaacaaagcggagaacaaaggcaacgtgcttctgagctcaggagaggcctgtcgtgaggagaagggcctggctgctgaggatagtggtggggacagcaaggacctcagtgaggtcagcgagaccacagagagcacagatgtcaaagacagctcagaggcctctgactctgcctcctagaacctgccccacctggtcccaaccttgccccatgtgcttttacaataaatgtcacccagtggccttgggaaatttgtgaatgtgcatagtggggtatgcttttttttttccagttcctatgtgtcagggatactatcttcacagcctagactgtattgagctcacaagtcaaaacagatttgaggatgggaccccaaatctgactatcttcaacaactgagttgaagttggcaggtaaactgttttgggtgctatattctttttttgttttttgtttttttctggtttttcgagacagggtttctctgtgtagccttggctgtcctggaactcactttgtagaccaggctggcctcgaactcagaaatccgtctgcctctgcctcccgagtgctgggattaaaggtgtgcgccactacgcccggctgggtgctatattctgatgtcacgtgtctggcctataggcctcattaatgtcctttttgtcctaat

SEQ ID NO: 35866 - DNA, 1220 bp, Mus musculus
caggggcaccctaacttcacaatctgttgagatcaccagcctcagctgccaggcccagattcagtctcctacctactccctcctcataaggccagacttcctcacccagttcccaccagggggatctagagcttgactgctcagtccaggcctagaagagcagaaggcggggtttgaaaccccgcccttcgtcccgcccccaactcggggcccttcggaactctgaagaggatcaggtgggtgggacactgctcggtcagctgagtgatagtcacgggatcgcgaccaagtctgaattcctggaggaaagcagatgatggacctaggactcctaatgttacaggtatgtggtagtggatggttccaactaatggtggggtcagaagcccattgaagaggtgggagtactgtatccttggctcgaggccctgtggtggtggggtggaatcaagtagctctggggcctactcgagttggttcaggaagtccctgtgaaggaagagctgtgcttccctgctctgccctgattcacttcacaggacatggagaaggaacgggagacactgcaggtctggaagaagcgtgtggaacaagagcttgatcgtgtgatcgctttctggatggagcattcccatgaccaggaacacgggttagctatcctgccatgatcctcctagggcccccctccccctatctcacttggaggtgacacacagatctactgacctgaggagagtagtgaagctatggagaacggctctttccttcactttctgacaacacttgtctcacaggggcttcttcacatgtcttggccgtgatgggaaggtatatgatcacctcaaatatgtttggctgcaggggaggcaggtcagtttgcacacttaaggtgttcacacaacaatagggtatacccagggatacttaggattccctccaccccagctactcctctctaaactgtgttccctcacaggtatggatgtattgtcgcttataccgcagttttgagcgcttccgccgtgttgagcttctggatgcagcaagagcaggtcccctctcctagccctatctccccaggggcttcagtgggttatgtattcaatgtatctaaagggctctagaagaggaaagggactggcaggttccaagaggcagtatattcagagtccttacctaccatgcatactttccaaccaccaggtggtgaatttttgctg

SEQ ID NO: 35867 - DNA, 1194 bp, Mus musculus
atgccaacaagtggtgcccagatgtagggattatgggaaacgcagtttctcatgctgtagaggacacatcagggtatgaagggattaatatactgtttcagaatgtcagcaaaaggtttactacagcggcggcggctgggttctctcccactttgttcccacagggggttttctatttctttgtcttcttcatgttttccgtttcaaaaaagtttgggagactggctgaataataggaaaagttgtgaatggatatggaggggtctgaaaaacaacaacaaaaatgtatgaaataggaaaaccagaagggtcactctagtctctcatttgaaagaattgcagagatggccgtgaaactggagagtacaggttgaaatgcttgagaagtgggtagttctggaaaagataaaaaacggttcagactaccaaacaaacaaacaaaaacccaaaacaataaaaagcggggcgtggtggcgcacacctttaattccagcacttgggaggcagaggcaggcggatttctgagttcaaggtcagcctggtctacaaagtgagttccagaacagccagggctactcagagaaaccctgtcttgggggaaaaaaaaggcttttgatcttaaattgtaggtcgagagcaggagataggaagaataaccttatctcagacagatggccttgatctagtctaagaacagggcaggagataagaaacactgtctcacctgatttttagattgctttaattgctttaattatcaaaatgcatgtggttataaagtttgatggttatgatattagaaatcctctgggagagaggtcaagctactaaattgagtcagtctatatctttgatgatttcaggttactggaccaaggacatggtattttgggagagaggttctgtatttgtgttaataagaaagaaggaagggctttggaccccttccagagtgatatggatcagatatgacaggggaagactcccctgaagatcttgactatagaaaaaaaatttcaagaaaatcaaacaagacaggtaacttaaattgctgatttctcatgggaacagtcttgtaactggcttagacataaaaatttctctagccaaaacctcagctaaaattaggtaataaatcttgttggttgaagaatccttttttttggggggggaggcatttcgagacagggtttc

SEQ ID NO: 35868 - DNA, 1599 bp, Mus musculus
ttttgttttgttattatccttgtatttccagccacctcccatcccttcttcaagcttagccagatcctatctcgcccagtgaaatcacaggaagtttaacgtatctcagaggcctttgagttcccactcaatacctctccctctttacagaagagaggggtggggggagccttggttggtctgagcagtggctgtgaaatcctcccaatgggcacagaatggcccccaggaaccctggccttggcctacttttttgagcctgggggccacatcaccaactgctgcatatgttgtattttttaagttgaaattaatgaagttaacatttttattgtaattttagccttagcgtgtgggggtttatccctttttgttagctgtgtacagaatgtgtatcctatctcctcccctccttggctaatcattggcaggggtcttcctggggaaaagcttaaagagcagctagggaaggagagaaacagtgtcctgggtgagacttggtagatactgctccaatatcctgttgctagcccccacctccttctggaacagtgtgagacaattaaacttcattccctgtgggttagcacttaatatgtagaagcttgggcttgaaggtgatgtccaccttaatcagcatcacttgcagagactgaccctaaacaacacagcaggggcagggaacgggtaggacttgaccctcttgaaggcagcccaggatgggagtagggtatgccatatcccacaggggctatgagtaggtaccagataccaactcagtaattaattttgtagcattgtccccaagctctggatttttttctctccaggacccaagttttaggcagtgagtaatgcttataagcaaattactgaaggatttaaaaatggacagccaatgtgttcagccgctctggcctgtaccccctggggcctctagtgtattgtattatatttctgtggaaagtcatgtttagtcaaattggaatccactcacctgttccctttgttttccctatcccttctcctgagcaccctttgatttctgaggacagtactacccattcatctattgtagagtaacccttgtgactcaatattaccatagtgcgatgttgttttgtgctattttgaacaattaaaaagactttttttgaaataaccatctggtatttacccgtgtgtcaagagtgtcttgtgagccaggcaagtggtggcgcacgcctttaattccagcacatggggggcagaggcaggtggatttctgagttcaaggccagcctggtctaccgagtaagttccaggacaggagctacacagagaaaccctgtctcggagaaaaaaaagaaaaaaatgtgtcttgtgacctttggagattggaggctgggacctgcccaaggttcacttgagctactggaggccttttctaaccagaaatcatgggtttcaaagaaggccccagaacaaggtacacccctggggcctctaggaacatggtactacagctgaggggcctcttcttgcacagttgctgattttgcatttagaaatcagttcacctattctcccactaaggtagaaaaactgaccattggcagt

SEQ ID NO: 35869 - DNA, 1154 bp, Mus musculus
acgagcagtgaccactgtgacacagtctacaccagtccctggtccctctgtgccggtaagcctcaccccaaaggatcctttctgtggccttttgcccactttcatctgtgctgtccataaatggacactagatgtcgcccttgttccagaatggtattgttccttggttgttcttctagaccataaaagggcaatcttggtgcctgggaggcaggaggcaaacagtcccttagaggagcgttggtactttatctccactgttggtttccttctttgctgttccccatcatttgtctctacagtgaagtcttctgggcatgagtggaaacttgacccaggggctttcctcttgtcacacccttgctgatgcttcttgactcacattcctcatttacatttacccaagataaatgttgtgggtgataccataggcctacagggacaaaacaaaggctatcttgtttttctgccccactgcctggttctagcctttgtctcctcccctctccctctgacgggggcttctctccctttctagaacatctcatcattgactgagactaccccaggggctctgaattccgaagtccccatcccagccacgataacagtgaccatagccaacacagaaacttctgacatgcccttctctgctgttgacatcctgcagcccccagaggaactccaggtctcaccagggcctcgccagcagctgcctccacggcaactcctgcagtctgcctccacacccctgatgggggagtctactgaggtcctgtcagcctcccagacccctgagctccaggccgccgtggatctgagcagcactggggacccatcttcaggccaggagcctaccacctctgctgtcgtggccactgtggtggtccaaccacccccacccacacagtctgaagtagaccagttatcacttccccaagagctgatggctgaagcccaggcgggcaccacaacccttatggtaacagggctcactccagaggagctggcagtgactgctgctgctgaagcagctgctcaagctgcagccactgaagaagcccaagccttggccatccaggctgtgctccaggccgcacagcaggctgtcatgggtaggtatcagctggcagatttgagggataggcccctta

SEQ ID NO: 35870 - DNA, 1147 bp, Mus musculus
aaaaggcttgactatcgtacaactcctcctgccccagctctgcctcattgtcccttcatcctcggctctaagtaagtcattgttttgagatcacgggccaaacttttcttagatttgccttggatagttaacagagttggtggtcccagtcaacatgggcgagcataggatagtaggagaggtaaatgcaaaatcacatagtccaggcactaactcctctgttctctttccccagcctgtctcccagcctacccaggtcactctgattacagcacccagtggggttgaagcacagcctgtacatgaccttcctgtatccattttggcctcacctactacagagcagcccacagcaacagtcaccatcgctgactcaggccagggtgatgtgcagcccggcactgtgacactggtgtgttccaacccaccctgtgaaacccatgaaacaggcaccaccaacacagctaccaccactgttgtggctaaccttgggggacatcctcaacctacccaggtgcagtttgtttgtgacagacaggagacagctgcttcacttgtgacctcagctgtaggacaacagaatggtaatgtggtccgtgtctgttcaaaccccccctgtgagacccatgagacgggcactaccaacactgccacaacagccacctccaacatggctgggcagcatggctgctcgaaccccccctgtgagactcatgagacaggcaccaccagcactgccactacagcaatgtccagcatgggcactgggcagcagcgagacactcgtcgtaccactaacacccccactgtagtgcggatcactgtggctcctggggcattggagagagtccagggtaccgtgaagcctcagtgccaaacccagcagaccaacatgaccaccaccaccatgactgtgcaggccactggagctccatgctcagctggccccctgcttaggccaagtgtggcactggagtctgggagccacagccctgcctttgtgcaactagcccttccaagtgtcagagttgggctaagtggccccagcagcaaggacatgcccacagggcgccaaccagagacatatcatacttacacaactaataccccaaccacaacccgctctatcatggttgctggggagctt

SEQ ID NO: 35871 - DNA, 1195 bp, Mus musculus
gcccacaaccatcattaccaccacacaggctagtggggcagggaccaagcccactatcctgggcatcagtagtgtttctcccagcaccaccaaacctggcacaactaccattattaagaccattcctatgtcggccattatcacccaggcaggtgccacaggtaaacaggcagctttcaaaaggcctttgctggtttgctggtgagtataaatcaaaaagataagtcctcacagcttattttctctgaatccttccccaatgcaggtgttaccagcagtcctggcattaagtccccaattacaattatcaccaccaaagtgatgacttcaggaacaggagcgcctgctaaaatcatcactgctgtccccaagattgctactggccatgggcaacaaggagtgacccaggtgaggcacacatgacccctcttcacttcagtctagcatagaccacatgtgtcatcctaacaggtctgagaggggcagcacagtccattcagcctgaaagtgacattggtggcactttgctctgctgttccaggtggtgctaaagggggcccctggacaaccaggcaccatcctccgtactgtgcctatgggcggcgttcgcctggtcacccctgtcaccgtctctgctgtcaagccagctgtcaccacattggttgtgaagggtaccacaggtgtgtagcctgcaggccaggtcctcagcaatggctgggggaggataacaggtcctctctccagagccttctgtccttggtggctacatggcagggctcccattccctagccctcgagagagagacaggctgctagatagaaagtggtagcaataggcctcattctgcctttgcctttccctccatttaggtgttacaacgctaggcacagtgacaggcactgtctccaccagcctggccggagctggggcacatagcaccagtgcttccctggctacacctatcactaccttgggcactattgctacgctctcaagccaggtgatcaaccctactgctatcacagtgtcagctgcacagactacactaacagctgctggtgggcttaccacacccacaatcacaatgcaggtaagtgggtcctaagggtgtaccaccatacacagcagcactcccacatgaaagtagggggcattttagcctttctcccctttccagattcagttctatagacc

SEQ ID NO: 35872 - DNA, 1204 bp, Mus musculus
cctgcatgaagggaaggcatcagcctataatagtttctaggaccacctacaggtgcagctgtaggctctggctgtctttaactctggtacagagagaatcatgggctctgaataggaggaacatgagctttagggggcatttggggtatagaagtttaatgatcatgtaaacagtgggggaaggaagtcatggtctactagattctcagaggctggtgaattatcttggtgactttactgctttctgagatgaccttaatgagaagttgtgcaattgtttgaaagccagggttctgcagatggtttgaataaaatgactagagatttgtccataatgctctaaaaggatagtgtgctggctcagcctcttctctcttggctacatttgaagactaggagttgtagagtacaagacttaaggaataagaattgtggggtggggggcacttggattctagaagctcccggatgttttgacttttgtttccttttcttcagcaaccaaccagtggttcatcccagctgtgagaggggatatccctccagggtgtgcagcctatggctttgtgtgtgatggtactcgcctattggtgtttggtggaatggtagagtatggaaaatacagcaacgacctctatgaactccaggtaataacatagagcctctgtgggcctgggttgttacactgcctcgggccctatggaactctccatagtgttcattgtgctggtttgtgaggaaaggcagtggaaggggttacttgagagtctaccaaggctgttcgctccttgaacagtgtcagaggagagaacaggaccaaactctttagaacttacatgtttcagcaatgtgctctctcactcccgacaatcttttccttgtgccacaaatagcccctggcccctaaccagtgacttctcatctcttaaatattattgattttgtaggcaagtcgttgggaatggaagagactgaaggcaaagacacccaaaaatgggcctcctccatgtcctcggcttggacatagcttctcccttgtgggcaacaaatgttacctgtttgggggtctggccaatgatagtgaggaccccaagaacaacattccgaggtgaggctttgtcctatttttttctctgaagcgtcccaccagagtgggtctactttccccaggtataagattcatctgaaattctaaagttggttg

SEQ ID NO: 35873 - DNA, 1577 bp, Mus musculus
atggcggctcccagggaggaggcatgatcgccctgccgttaccgcttcttctgccgtacaattgtcacttcgggtcttaactcctgctctttcgagcggctcctgtgggaaggagtcttaaggagggaagcgaggattggacgctgccttgcgtttggtttgctgtggaagaactgtccaggaagaagaggataggtggggtgggggggggaagagaagctagtctcaagatggcggctcccagggcggccgccacagcctgaatagcagaggcggactcaagggagaggtgcaaaacctctcgagccatacgggtcggggcttcgagcagcaactgagagttggagcccgttccgccagcctctgacacgcctttattacttaggaacgttggggttctgcgatcggtggttgtactaagtgctgggtggggaagcaggacggtttcaagatggcggcttccacaattgtggtctgactgtcggcgaagttgagacaaccgcggcatttgtggctcttttccacccgccccggaagccagccagtgctggggacggggggtgtgggaaccgggccggggctccgccatttccggcgggggagggctacgactgaggaagggaggagagagaggcggctcaagatggcggctcccagagcctcctgctcgaggttctaagcgggaacacccaggcaaatagttagagcgacggcgctcagtggcctccagcttctcgggaataggtgctctgcagttctgagaagcttttaaggatacgagctgagtgagaagggggggaagagccaaaggaaggaggatagttaagatggcggcctccatggagtcgtccaccgctgtgtaaggagccgcttcttcgtgagagctgccttagacgaaagggggtgtgtgaagaattaagggtatcctcccattcagtgacctcttcccactgcatccttaaccggaactatggcttcggctgtgtctcccgcaaacttgccagcggtgcttctgcagccccgctggaaacgggtggtgggctggtcgggtcccgtgccccgaccccgccacggccaccgtgcagtggctatcaaggagcttatagtggtgtttggcggcggcaacgaggggatagtggacgaactacacgtgtacaacactggtaagtgctaccgccctgggtttctcaaagtcttccctccatctctctcctaacccttcttttccctatcttctcttttcctatctcactcccctgatgtgttttccttctctctttgcacttattgccatctttgctttctccctgatttttcaacccccgttcttacacccccgtactcttctgtgtttaaaggttgcatttcggtacttagagaaaccctctactccgactggtgagggggaggggatgtcgcgggcgacagtgacttcagacgtacaccgttacccagtgggctggggctggcgcggcagcggatgtgttctcttggcgcaggcggaatcctcccccctcctgcgatagtcctcatctccagcgcccatgctcgttcgggagaaaagataatatttagat

SEQ ID NO: 35874 - DNA, 2137 bp, Mus musculus
agacaagaagttgtccccaacttattaagtgatattttcttttccataggcttggatttagaacctgaaaagagccagggacctgaagaaagtgatgaattccagagctgatttgttcactctgacaaatccctcagactcagaggtcaaagttctcatgcttggaagttctcatagtgtgcaaactcctcagtagcccaaaggcatcaggtgtgggggctcactctggcaaaggagagagggcagtggaccctgctgttctcagaatgtgaacacagacagggccagccaaagaacttgatagaagctgataaggcaggcaatgtgaggccagcatttgtgagcaaggcaagcagagtacctaaggaattgggtagtacaaaacagaagactggggctggtgagatggctcagtgggtatgagcacccgattgctcttccaaaggtccggagttcaaatcccagcaaccacatggtggctcacaaccatctgtaacaagatctgacgccctcttctggagtgtctgaagacagctacagtgtacttatatataataaataaatctttaaaaaaaaaaaacagaagactgctagctacacaggcccagaggacacaagtaggtctgtttgtatggtgggagctagctcccctgagagctagataatatatctgcagtctgtgagtctattcctcagaacttccctaaaacaccaagcgaaagtagctgttgtgcttgtaaattgcaaaaaaaaaaaaaaaaaaaaaaaaaagagtgtcttacagttcagtccactagctagaagtgagcactctgagattctcccaagagtctaataaaacccccctccccatcttgggtggatatatgcaagccttgccagatagcagtgagctagtttcatatgactacctgcctgcctaggcaggctctctctataccctgcaaattgactgtggatgcccaaggttctgcttatggcagaaaggtccagcaaagcccagctttgtggtacccagacagtgagaagccccaagaaagaagaaactgagagcaaagctaagtatttgagggggaagaatgttacatttaaaaaaaaaacaacaagtttttgtataattaagtgtcttcacaagtagcccagggctatagcccaggcttacagtgattctgtgtttgagtcatgagtcacactacatgcccctgtgtaattggtgacatccaatttgtccttgagtaataaaagcatacatttcactgtctggttaaacttgtggaatttgttgtgctaaaagtgttatgctttcctaatgctttatatctctgggctcttaagtgtccacccaaaactcaggcccctagcatttgttcttttctcttgtcaggccagactggggatagatccccttgctttcttgtcttgcagatttcgtggatattgatgctattggaattgaagccttcatgtctgaattattcatcaatcatatatagaaatttcattaagttttgatcctgatctttattctgtggccttacttcttagccccacttgttttgggggtgattactctgagatagtttgtatacaatcaacctatctgaaaataaagataattttactccattgccaacctatatgccttttaattttcttttctttttagaactaactatatagccctgactgtccttgatcttgatatgtagaccagactggccttgaactccagaggtctacctgcctctgacaaggcatgctctaccatacccaacttgactttttttttcttcatttattgcattggctagggcctataagttttgaatacaagtgggaaaccccacccactctcaggagtttttctcacttttcttaacaaatctatgtttgttctattaaagaaaaagaaaataaacatcattgttatttttcttgtaaaggtggaattgaaagaggagttacagaatatttcaaatgatgctactgagtctattgagataaacagaatttattttcattctgttcatgcagtggtcacattggttttgaaatgttaagctagatgcatattctggcttggttgccacatgttctgtttttgtttgttttgctgaattctgtaagtgcaatttta

SEQ ID NO: 35875 - DNA, 1138 bp, Mus musculus
attgagcttcagtttcccatatagaaaacagactttaacacaggaacactattccagcaattcctaggcccagaacatgcttggctaatgctgggtcgtcaccttttacagagttacatctcccattgcttctccaggatgaagcctatttttgtccactgttgggcccagtgggggatttaaccaacccaacaaactgaaccagattctacccatccctccttcctttactgcgtccattagcacatcccagctcaagtactggttgttcagaccccacggaccttgctaacagactagtaggtttgttggcatctgtttcccccactgcaatgggatgtcaggactgtaaaacacggcccagagtgtttgatttgtggctgttatcagtagagccccagacagcactaggcacacagtggtgtttaatgaacctagggaaagaagaccagaggactgagtggcagtggcctggaagttttggtggaaccatgctgaactgacagtatttgttttacagaaagacctgattgaagatgaggctgaagaggctggagtgaccctgaaaagcacccagcctactctgtgggtgggtgtagccacggatgcttgggctgctccaattgctgcccagatctataagaagcacctggactccagacctgggccctgcccaccccagttgggcctggccctggctcaactagcttgctgctgcatgcaccgtcgggccaagaagaggccccccatgacccaggtagccctggggaggccagttaaccatggggacatagtggccagcaagaaaactttcgtacttgccctgcttgatagcaatagctacaaagtacctacctgatctcttacagaggcaaaactcccaacattccttgcttgccctttggctctatttggggaggtgctctgtggaactaagtggtaaagggctgctgctttgctggatgagcctcagatcccaggaacaggtagaaggaaagggctctgatcatgcccctaagtgggggtgctgtgccactcactacctttgtctttttgtcttaccttccacctcttctggtgatggttaagaatagagttcctggctttggtggccatgaatctcaatagttcttgggat

SEQ ID NO: 35876 - DNA, 1147 bp, Mus musculus
gacccaggcctgctccccactttcctggcctcaacgactggacattcttctgggcacagcccgggctattcagtttttacatcaggatagccccagccttatccatggagacatcaagaggtgaggaggggctcagaagagctatagaaagtcatatggccagggagacagtgaccctctgctcaatgaacagctctgttctgagtgtccctgtgatattcttcctgcccagtcctgtgaatatgggaacaggtgttgcctgggacctcagagctgagagtacttagggctatgagtacccctgcatggtgcaagtatacaaataaagccacggtggtgagcagaagccaaacaatgtgaaggggctcagggactgcgggccctcagacagctgggatgcaatgcagccactttccataagcagtacgcctctagtccagtttatcaggaccatttgggtgtaggggacagaaaaacagaaaggtagtaggacctgaactggtgccattcttccgtttgtttccaagttctaacgtgcttctggatgagagactgatgcccaagctgggagactttggcctggctcgtttcagccgctttgcgggggccaaagcaagccagagcagtactgtggcccggacttccacagttcgaggtaccctcgcctacttgcctgaggagtacatcaagacaggccgactggctgtggacaccgataccttcagctttggggtggtgagccaccagcccttctgttggcttggggagggaaaagcaccagtaagtaaagtcaggaaagcctagagaattctaggcctaaggcagaggtgagcctagtggggagctagcatagctttggccttagggatcaccctgcctcatacacctccctcttcccttgcactaaattgtggtcataatttgcatccttttgcttaagcttgcatcccataacaatgctgcccttgctgggaggtggtctgtacctgcctgttccgggactactttcccactagtcctgatccatgcccatgctacaagcctcttctacacacaatttctccctgctaaagtgatgttgtctatcccccctctaggtaatactggagacccttgctggtcagagggctgtgaggacacaaggtgc

SEQ ID NO: 35877 - DNA, 1627 bp, Mus musculus
cagggctcagagcatttaaaaaccctccaaactttgctgagtctagggactagagagaagatagaagatttggtctatctccaaggtgtgtaagctgtaccaggtagaatgccagggaccccagaaccacatccaacagcccaatgggtctcctccagaaagtagtgaagactccagaaacatccctttctcttctccctgctcccatgagtaactgcatttgcttttgtaatccttaatgagcattatctgctaaaaaaaaaaaattagctgtaacagttctttttgcaaaaggatcattcttaaataattaaaaacacccccccccaaaaaaaagtccagaaccttgttcttccaaagcagagagcattataatcagggccaaaatctgtcccacacctctaccccatctcctcatgattgctgcttctaaggccagaatacagcaaagatatttgtaggccctttgggtgactgggctacccttggagctcttggaagatgggctggggaagcctctgagaccctatcctagggccttgctctagggagtaatcagtattagtagagtgtcacaacattattccccagccggcatgagatgggggcagaagaagccaaagggttgtctccactgctacttacttggccactgacaggtaggtgaccatgtatgtccatatgcatgttttatggctgatgtgagatcagcacccaagttagcttcacctggtgacctctaaccctgcctggatggagcaggccacctggttcaatgtttctgggcagctggacaatggagtgcaaaaggcttacagaacttgaagccttttccttactttgctagcacggcctccttttccatttgatttgtcactgcttcagtcaataacagccgctccagagtcagtagttgatgaatatatgaccaaatatcaccaggactgttactcaacgtgtgccgagccctttccttgtgctgggctccctgtgtacctggacactgtaatgtgtgctgtgtttgctctccttcctcttccttccttgccctttccttgtctttctggggtttttctgttgggtttggtttggttttatttttccttttgtgttccaaacatgaggttttctctactggtcctctttaactgtggtgttgaggcttctatttgtgtaatttttggtgggtgaaaggaactttgctaagtaaatctcttctgtgtttgaaatgaagtctgtattgtaactatgtttaaagtaattgttccagagacaaatgcttctaggtacattttcattacaaacaaagcatttgaagggagggaagtggtgaataagacaagaggggcaatctgaattgatccctgcccagatcagccagaagctaccaaaagttaagcactggttttccattccaagtcaagagactgaagctgatgttttgccattttcaaagtcaaagcaaaaccagcttttccacccaatggattctttgcttctccttcccagattattactactgctgtaataatctaggagtgccaggagggaaaggagtattaacacagagctgtgctcactgagtatggaaaggcttggtctgagttttcaggaggatgacccactg

SEQ ID NO: 35878 - DNA, 1160 bp, Mus musculus
agactagaggccatgaacattggacgtgggaaccagagcaacccgaattgctgctgctttattcagctttccgttgctctgacaatgataaaacaaggcagtaacttaaaacagactgccaggtttggcagagaaaggaaattccttagctgacagcacctctggattttaaataggttgtaataagtggctcaaacccatccaggaaaaagcaaaagggttagaactgaccagatgagaccagcctgatttcatgcagcccaaatggagtccagctgtctgaactctgcagcacttctctactacagtctcctagagcattccagccaggctcttcaggctgaggagacatcacaggtgccagttcttcaagaagacttttgtgcatcagttcatagcctatatctttgcccaagattgtagattcaggttaacactacagattctagggcagatgactgagactcagaaaaaaagcccctgtggactgtggtatagcgaagtacaaaaactgaagggggctagggcagatgccgcatgcctcatgccagagccaagccctctgctccatccacatccttttctggctccttcttcctgctctctgcttcagtgaaccagccccactctgaagagatttgttgattctctccatttttatgtctttctcttttaggtactatatagaaaaggcttagtctaattgttataaattgctagaatactgcctcccccagggtctaaaaatatatgctaaaggggaaaacttgaacactgaaaccagttctgaacaatttagaaggaaaaccttgaaaacatttaacaaaaaattatattttaatgtttatgaataagaggaggcttttgaaaaaatgttgatctataaatacttactttaggcctgaggtgtctaatgagtgaactgagcaatgggaactcaaggctgaagcctcctgcatcagaggaggtagaaccaggagcctcttgagatttgaggtgttttagcattggaaagccactctttgggtagctggccccagaaactacttctgaccttgtcatttggaatggaggttagtggtctgccagatgccaaagctgcatgagaccagctcttggtttatcaatttgaacactcagtaacctagaaggcccagcac

SEQ ID NO: 35879 - DNA, 1131 bp, Mus musculus
tgagaaaagcgggaagggactgaagacctgcaagagccctgggcgtaaaagcaaggagagcagccccaaggggcgcagcagcagtgcctcctccccacctaagaaggagcaccatcatcaccaccatcactcagagtccacaaaggcccccatgccactgctcccatccccacccccacctgagcctgagagctctgaggaccccatcagcccccctgagcctcaggacttgagcagcagcatctgcaaagaagagaagatgccccgaggaggctcactggaaagcgatggctgccccaaggagccagctaagactcagcctatggtcgccaccactaccacagttgcagaaaagtacaaacaccgaggggagggagagcgcaaagacattgtttcatcttccatgccaaggccaaacagagaggagcctgtggacagccggacgcccgtgaccgagagagttagctgactttacatagagcggattgcaaagcaaaccaacaagaataaaggcagctgttgtctcttctccttatgggtagggctctgacaaagcttcccgattaactgaaataaaaaatatttttttttctttcagtaaacttagagtttcgtggcttcggggtgggagtagttggagcattgggatgtttttcttaccgacaagcacagtcaggttgaagacctaaccagggccagaagtagctttgcacttttctaaactaggctccttcaacaaggcttgctgcagatactactgaccagacaagctgttgaccaggcactccccccaacaatatcctccctcttccccccccccacccccgccccgtgtgctcgttagggcaattgagaggacactcccatttttggtgccattgatgccctgtccataatagcttccctgacttttacaccaccccaactcccaatctgaaggactgggaggtgtgatgcaggagaaactatgggactcttgggagaagactatggagttggccagtgattaaggcccagtaattccaactgtggtagcacagatctggctccacatcaacccaatccaaaactgacaaggatattttgcaaaaaaagaaagtggcacctgtctgatccagctctgacatggct

SEQ ID NO: 35880 - DNA, 2447 bp, Mus musculus
aggtaggtttatgggtacagctctgagtgtagatgtatagccccagcaccaggaagcatgtggaagtatcaaggctgtgctgggtagctgaatgcaaggaagccagtgagatagattctgcctgaccttctattttcccagggagcccagcagagtttattgtgaacacaagcaatgcaggagctggtgccctttcggttaccattgatggcccctccaaggtgaagatggattgccaggagtgccccgagggctatcgtgtcacctatacccccatggcacctggcagctacctcatctccatcaagtatggtggcccctatcacattggtggaagtccctttaaagccaaggtcacaggtgagccttaggctaagctgttggtggccacccaatgccttgatacttgagcagcttcttagtctcacccattctgttttgtaggtcctcgtcttgtaagcaaccacagcctccatgagacatcatctgtgtttgtggactctttgactaaagttgccacggttccccagcatgcaacctcaggcccaggtcctgctgatgtcagcaaggtagtagccaaaggcctggggctaagcaaggcttatgtaggccagaagagcaacttcacagtagattgcagcaaagcaggtgagtagccctatttttagcttctggaagtgcaaagccataaataacaggatggtcagcatgtaggaagtacaggaactgcctttaggggtatgattattgcttttagagctaccttctatttgggccttcgtactttcctttctacccttcaagaaaatgtcctggagtggggctgctgaaaaggtggctcagcagttttcagaggactggggttcaagtcacagcacccacatggcagctcacaactgtctgtaattccagtttcatgggatctgttgtagaaattatttaatccctactgttttacccagggtttctaccccaccttagattagttctcagattaaaaacacacatgatctttatatttacagtaagccttaaacaatacaagagcttggcagatactactctctatgttgttagaatttattttcctatggataaccccaagttattacttactatgtttcatttgggttgctcttaactccaattgggcagctctcagggcccttgactccagctcatggtggcttctccttcctcctctattttcttacacagatatacatgcaggcaaaacaccaatgtcctggaggagctgtaatttatcctctggtggtctgggtggcaaggctggggtatgagatgcttgcttgggaatgttaataatcaggcaaggaacagaatgtggaatagtgagaagggctcagagcaattatagacaaagaaaggatctaaggccactgagacctattcctgccttaggtaacaacatgctgctggtgggcgtgcatggcccaaggacaccctgtgaagagatcctggtgaaacacatgggcagccgcctctatagtgtctcttacctgctcaaggacaaaggggagtacacactggtggtcaagtggggtgatgagcatatcccaggcagcccataccgcattatggtaccctgagcctgccacctaagttggcacctgtgccagctagaagctcccatggcaatgagcatccccacacctgtcctattcccaagaagccccattttcctttcctgagccctggaccctcccttccctggatcactctggccgctcttcactgcattcgcccttgccctgcactgtgttcacctgtctctgggctttcacttgggcagagggagccatttggtggcagagcatgtcttctttggttctgggaggtggaagtcctatgtacaaccaccttctagttctctttcccagccaagaggaataaaattttgcttccgttgtcctgtgaatgtagctttcatggaaggagtaatggaaggccaaactagcaagggcaccaacaaggcaaaaaacataggccatgggacctctgagtagcacagtttgtacttgatcttttgcttcacagagggggatatacggtgtgcctagaatggcatatgggatcaagcagtcaaaatgtagggcatgaagattcgttgctagcttgttggtgatccctaatagtgaacagtctttgaaatagcatcagggcatagccatttcttacatatcatgaacatgataccagcgcttttatttattttaggttttttttttccagacagggtctcattatgtagccttgaatagactggaactcattgggtaggtcaagctggcctcaaactcacagaggtggtctctgcctcccaagtgctgggattaaagggtgaaccaccatgcctggcttgctatgaaccctttaaataagacaccattacaaattccccttcccacaacagggtagatatcttg

SEQ ID NO: 35881 - DNA, 1134 bp, Mus musculus
acatagtctccacttggttcttattctccatcgtaaggttccagggacaaccaaggggactgtgggagggaggcaagaggcctttcctaggctagcctttggggatatgtggcacctccaggtatagccttatgttctcttcctttccaggtgactatgaggtctcagtcaagttcaacgaggagcacatacctgatagccccttcgtggtgcctgtggcttctccgtctggtgacgcccgccgccttactgtttctagtcttcaggtgaggcactgagagaaactgcccatctggggctcctgggcccggccagaccagagtcaccatagcaagcaggtcttggccctgggctgagtgcctacgcagaaataattctggatggtaggcttctgctctggccgggtacagcccacgcttgaggttggcaggaagtaccctgcccaccgcgtggagtttttctcgtgtctcaggtctaaaggctttgaacagaaccctgtgcccattgagcaccagggctgaggtttaaagagggacagcctgttagagctgagtgctacctacagggtgggccaccttgcctttctgctacctgggtgtgtgattgtggagaacatgtttaggagataggaggttgggggtatgcctgtggcttgctgccctcacagatcaatggctctccctctttaaaccatgttggacaccagatgggtaagtgactctgtcggtcttctgctctcccatttgccctggttctatacatcctgtctaaccacatctgctatgcttccaggagtcagggttaaaggtcaaccagccagcatcttttgcagtcagtctgaatggagccaagggggcaattgatgccaaggtgcacagcccctcaggagctctggaggagtgctatgtcacagagattgaccaaggtgaggctctatccctgcctattcatccaaccatttgacctagctgactagaagtaggctaatgtagtgattcaaaagtgggctcctcagctaaaaaacccttcccagattgacaagcacccaggaagataatggctttccatcatggccactaggaagaacaccttacaccagtgtcatacatgagaaagacataaaaacagagacag

SEQ ID NO: 35882 - DNA, 1183 bp, Mus musculus
ttcaggcctcggggttgggtagggaggaaagtttcacatcccccacactgcagcaggactctgcctcacttcatccacacatagcactggggcccagggccagaccacgggtgtaggtagccatgggcctggccagagtgccggtataagttagcataggccatgataccagctgaggctgagttggcagaggaggtagcagtaaatgcttgtgctgggattggatggtcccttacttgtcttcccaggtatctgggtaccacttgttggtcttctctcataaaggggcttgaggtggtcaggagaatccttcctgccttctgagaaaccactcaccatcgtagcttggggtatgggttgggctagagattggggctggctgtgcttggttgtagcagtaagaggcctggatgggtagcaagctgatgggggtagccaaaatgttcggctcacctgctggctcccctctggggattcactctgctttaccaggtgctggcattggccccaccatccagattggggaggagacggtgattactgtggacacaaaagcagcaggcaaaggcaaagtgacttgtactgtgtgcacacctgatggctcagaggtagacgtggacgtggtggagaatgaggatggcacctttgacatcttctacacagctccccaaccgggcaaatatgtcatctgtgtgcgcttcggtggcgagcatgtgcccaacagccccttccaagttacagtgagaagaggccaaggatgggtgggcagggagatctgggaaagtcctagcctgtccttccaggtccctttgtgacaacagtctccaaccctctcactttgccccacaggctttggctggggaccaaccaacagtgcagaccccattaaggtctcagcagctggctccacagtataactatcctcagggtagccagcaaacctgggtaaggcctgggcctggtctattattcaatttgtctaacccatagggacacttgaagctggccacctggatgtctcatgtggccctgagaaaccccatatcttctcatagcccctcacctgattcttctgtctctattgcagattccagagaggcccatggtgggcgttaatgggctggatgtgaccagcctgaggccctttgatcttgtcatccccttcactatcaagaagggggag

SEQ ID NO: 35883 - DNA, 1501 bp, Mus musculus
cccttcccttcccttccctcccctcccctcccctcccctcccctcccctcccctcccctcccctcccctccccttcctttcttttgaagctgtaaggtgaagatccttccttccttccttcctccctcccttcctccctccctccctccctccctcccttccttcctccctccctctctctctctctttcctccctccctctctccctccctccctccctccctccctccctccctccctccctccctcccttcctccctcccttccttccttccttccttccttccttccttccttccttccagccctgggtatcttggaactcactctatagacctggtatgattgagcaggtgatctattaggcagcctattcctttcatgtctctgggtaaggaagaaacctagggcaaaaggagacagatgaaaggttgggctgatagatgcttctgatttcttccttccctcaggtgaaggcgtttggaccagggctacaggggggcaatgcaggctcccctgcccgcttcaccattgatacaaagggtgctggcactggtggcctgggcctgacagtggaaggcccctgtgaagcacagcttgagtgcctagacaacggggatggtacatgctctgtgtcttatgtacccactgagcctggggactacaacatcaacatcctttttgctgacacccacattcctggatccccattcaaggcccatgtggctccttgttttgatgcatccaaggtgaagtgctcaggccctgggctggagcgggctactgctggtgaggtagggcagttccaagtggactgttcaagtgctggcagtgctgagttgacgattgagatctgctctgaggcaggactgccagctgaagtatacattcaagaccatggtgatggcacacacaccattacctatattcctctctgtcctggggcttacactgttaccatcaagtatggcggccagcctgtgcccaacttccccagcaagctacaggtggaacctgctgtagatacctcaggtgtacagtgctatgggcctgggattgaaggtcaaggtaaggaggcccgctgtaggggggttggctagcagttacagggtgcaaagagtcctgtagccacagcctcctcactatggccttttccaggtgtcttccgagaggcaaccactgagttcagtgtggatgcccgggctcttacacagactggagggccacatgtcaaggctcgagtggccaacccctcaggcaatctgacagatacctatgtgcaagactgtggggatggcacatacaaagtggaatacactccatatgaggaaggtatgaatgtactggggataccttaggcagagcagggagtaagtggagcagcctagttattcctgacctgccctgtccttcaggagtacactctgtggatgtgacttatgatggcagccctgtgcccagcagccccttccaggtgcctgtaacagagggctgtgacccc

SEQ ID NO: 35884 - DNA, 1363 bp, Mus musculus
taaaaatggtgccttggcaagggaatactagtaagttccttaagtcatactggcttgtaggaagcttcttgattgaaggagaagaacctcacgtatgaaggatgacctcgtgtactgctattctataattggagatgaagcagtcaggattgtgcaggtgcaaggggttaggaaagtacagcaaaccagatttttcagagaacaggcatgggcctgtcttggtggcaatagcccatatagcatggatctgaggcccggctcaatgctgggtttacattgaacaaatctacctgattggattgtacctagctgggggaggggcactgagcctgcagagggatagggtctctaatgctgtgtccataaccctttagggtctgggaaccagggtatagaggtgagagggtagccctactagttggttcatggctttctcatcttctgacaggcatcgagcctacaggcaatatggtgaagaagagagcagaattcactgtggagacccgaagtgctggacagggagaagtgcttgtatatgtggaggacccagctggacaccaggaagaggtaggattatccattagcagggcaggattctgttatgcccccttttaaaggggttgctcttaacactcttcccattacaggcaaaagtgactgccaataatgacaagaaccgtactttctctgtctggtatgtccctgaagtgacagggactcataaggtgagtccttggctgagaaggaagctggtggccatgggtagttggtgaagggccccttacctcactctcacagcctgccccttctgggaacaggtgactgtgctctttgctggccaacatattgccaagagcccctttgaggtgtatgtggacaagtcacagggtgatgccagcaaagtgactgcccagggccctggtctggagcccagtggcaatattgccaacaagactacctactttgagatcttcactgcaggtgaggggagacagcccaggcccagccagccatgggggagagctgtgctggggtcctagagctgagtctgtgccttgggacaggagctggcatgggtgaggtggaagttgtcatccaggaccctacaggacagaaaggcacagtggaacctcagctggaggccaggggtgacagcacctatcgctgtagctatcagcccaccatggagggtgtccatacagtacatgtcaccttcgccggtgttcccatccctcgtagcccctacactgtcactgttggccaaggtaggcctgcccatgagtgttcttctactgtggtactatggcctggggctctagggagggagttggcaactgggactgtcccactgaagcccatgttt

SEQ ID NO: 35885 - DNA, 1091 bp, Mus musculus
caacacttcctctgtcttttcccccactctggagcagcagttgtatttcctaactactctttgccaacttagccttcctcttctttggttccaacccagcttgaggtcaggggccctgtttcttggccagttagggctgagccacttctcccaattcccatagatctcaagatattagggcaggtcttgatctcagcagctgtacagcatccatctcacttgctcttccaccctccttctgggctttgcggtttttggcagggtcccttttattggattgtattatgtgtctatgggagtctttcccccccaaactctcctttatcacaaaatattttcttacaccatttagatgccctgggcagagggtgcctgatccactttctacccctagttgggaggggcctcttgtcacctaattgatttgctgtgctgcagacctaggtccctccttgctggccttcatgagggaataccctaactgcaatgccgccacgccttttcccacagacagcaaggctattgtggatggaaatctgaagctgatcttaggcctcatctggaccctgatcctgcactattccatctcaatgcccatgtgggatgaggaagaggatgaggaggccaagaagcaaacacccaagcagaggcttctaggctggattcagaacaagctaccacagcttcccattaccaacttcagtcgagactggcagagtggccgggccctgggtgctcttgttgatagctgtgccccaggtaagggagatcttgggctaagactgtctggtcaacctagaaggtagctctatagccccagactcacaacaagttcttttctgtgttgtaggcctatgtcctgactgggactcctgggatgctagtaagcctgtgaacaatgcacgggaagccatgcagcaggctgatgactggctaggcattcctcaggtatgctcccggactgacccctgcagctaaggggtgcttggttaaagtgaagagagacccaatggctcttgtcttctgtctgtaacaggtgattaccccagaagaaattgtggaccccaatgtagatgagcattctgttatga

SEQ ID NO: 35886 - DNA, 1197 bp, Mus musculus
gacattattcgctccgccttctgcagggaccttggggaaagaaagtcccttgtaagggtgtgcctgctggagctgagcaattctgtgacagaattgctcaagcgttcctagatctggggtccgtttcctgtagtactgtagcggatgttgccagacctttttgtgctctttggggctcaaagaccctttctgaagcagcggggctgagttgcttttggcggagtgcagaggcagcttcgggggatgggggcggggggcgttgtggggcattccaacgggaggggcgaggtggggcgggcgcggcccagaagccccacccagaggctccgcccccaaggaaactttgcctctggctccgcctttcgcatacatttaaagggctcgctctttccgcagtgcaacctctgttctgtgcctcgtcgttcatgctcggaggtgcctactgctttaattaaagggccgtcccatcggcgaagctgcagcaccgcccctccgttcctcgcgcctcaaaatgagtagctctcactcccgctgtggccagagtgcggcggttgcgtctccgggaggcagtatcgattcacgggacgcggagatgccggctaccgaaaaagacctagcagaagatgcaccgtggaagaaaattcagcagaacacattcacccgctggtgcaatgagcaccttaagtgcgtaagcaagcgcatcgccaatctgcagacggacctgagcgatgggttgcggctcatcgcgctgctcgaggtactcagccagaagaaaatgcaccgcaagcacaaccaaagacccactttccgccagatgcagctcgaaaatgtgtcggtggcgcttgaattcctggaccgtgagagcatcaagctcgtgtccataggtgagggcacgggctacactggggcgctgagtgggtgcgggcgtggtcgcaacaaattcttcctttcttctcctctagagtctctcctagttgtcttccctagctgctgcacacaaccaaggctaccactaggccccttagccgccttgttctttgaggtcctcgagaacaaaaggctggcctggcgagcatgcgaaccgctacgcgcccccgcccgcagcgccttgctggcctgctcccaggctgagctcacatcctctgtaggccgcgcccccaacgctgcacccgaggtgggacaggcacagactaggct

SEQ ID NO: 35887 - DNA, 1431 bp, Mus musculus
ggacgactatgcggttttgtccgatactgagctggccgcagtgctacgccagtacaacatccctcatgggcctattgtgggtatgctgcacccggtggcgctcagaacctctcttggtccactgctttcccgcgctcctccctgagcgttctccccacctctccctcccctcaagtcccctccccgtgttcccttgtgctcttggggtgctcggctcacgccctctgaccgcttcgcaccctgtgtctgggcaggttccactcgcaagctctacgaaaagaaaatcttcgagtacgagacccagagaaggagactcttaccccccaactcgtcatcttcttcattctcctatcagttctcaggtgagcccttaactgcagagccccaaagagcagcttggggcacacgtcttagggagggagggtgtggccgaagctattgagggagtagggggaaggctggagatcgaatggtcctgtccctcctccttcacatgcagacttggattcagccgccgtggactcagacatgtatgatctgcccaaaaaagaagacgccttactttaccagagcaagggtaaggcaggtatagggtgggcactgatgtttttatcccatgcttccgggatttgggcacagggaaaccccagacctccctcacctccttgtaccagttctcagtggcttcagaggggagaaactgacacagcacacacaggctggggagggagaagaggaggccagttaaggggcaccactttttcctctaccactgttttcctccccaagactataatgatgactactatgaggagagttatttgaccaccaagacatacggggagcctgagtctgtgggcatgtccaagagcttccgccagccggggacctcacttgtagatgctgataccttccatcaccaggtgagttggctggtaggtatacctggggtgcagccttagggaattctaggtttggataggtgcagagagtggatcttaggctttcaaatctggttagggtcagcatacagctgtcgggttaaaaattctatgttggaaccttcaaaactattggatttggggatgctcagcagaagagtatttacctatggtttcatctccagcagcacataacaaatgttttggggttttggcttttttaaaagatttaattactttaattatacatatgtgtggccaatttttgttagtttgtgggtatttccccccccccacttcacccccagtaatgaaaaattcccagaattccaaatatcacacaattgtagaaactatctgaaactcacagaaacacacctttgctaaaagcatgaggcaactcatagttagctgctgtgaagcagccccatattccacacctaagattaaaacaaaaacatattcttacaatatttctgtgtttcttaaa

SEQ ID NO: 35888 - DNA, 1451 bp, Mus musculus
atgctggaacaaagtcaacagggttagtaactgagcagcaaggccccacagataaagaggctccacatactcagaatgggggaggggggggcaattttctggtccctatgatatgattagagcaggctagccagagacatttaaggaaaaccattcttccccatttctaatcctaattattctgcaggtgcgtgatgacattttctcttctttagaagaggaaggcaaggataggtgagtagtgaacatatgtagggacagggacaaattcgagtctcagactctcctgcctacctgttgccttcttttgccacagggagcgcctcatctatggccaagacagtgcctaccagagcatcgcacactaccgccccatttccaatgtctccaggagctctctgggcttatcatattatcctacatcctccacctcttctgtgtcctcctcttcatcttctccctcttcatggcttacccgacgtgccattcggccagagaagcaggcccctgctgctgctctgggccaggatcgacaggtcccactctggggccagctgttactcttcctggtctttgctgcctttctgctctttgtttactattccatacaagctgaagaaggcaaccccttctggatggatccctaagggtattggttttagagcagctcttaccaggagttttggctgattgccttatcggtgtttgctgggggtggggagggtaggggcttttttgtgtgttctagttgggtgcaaggtctagcctaaggcaatgcttgtctcccacctcatcctgccaaggaagcagcaaatgttggccttctacagcccagtaggcctacctgtaccttcctctggagcctcctagccctattgcctctgacccttagggtaccggggtctggtgggaggacctcacttcattagaggaaaacttggtggtggcagtggtagttgtcatgcatgcctgtttgttgtcaccttttcagggggtattaacaaagaccaccctggctttgctttcatggacacaataataaacatgtttatttttaccttgttgattcttcctactgggataggagctgggctgccatggcacaggtggttggttttaggtctccaaactcaatgtggcttttccctttggttgtgcttggccttggggaaggaaacaagtgctacccacagataagtctatgttttggttgtgggctttatttctgggcctacttcctgaagttcttataaccacctagaaaaataactaccgtgtaatcaaatgtgtgggtaagcctatgggaaatgtaggcaaaaccgcatgtgacaacacattcagatactttagtcgggagaggctaacaccaacatctgaggttacaaggatagaaaagaaatgaggcatcttgccagtacattgttattcagctcctgggattggtggcatgg

SEQ ID NO: 35889 - DNA, 1171 bp, Mus musculus
tcactttgtagaccaggctggcctcaaactcagaaatccacctcccaagtgctgggattaaaggcatggaccaccatgcccggtgtgttaattggcatttcttgtgtacttgtggattatatattataatttattcaatgtcctgacaccctgtttcactgctgttatttccccattcagcactggaggctgcccgtatttgtgccaacaaatacatggtaaagagttgtggcaaggatggctttcatatccgagtgaggctccaccctttccatgtcatccgtatcaacaagatgttgtcctgtgctggggctgacaggtaagctggtgttttatttggttttgagacagggtttctctgtatccctggctgtccgggaacttaatgtacaccaggcatatctgagatctgcctgcctctgcctcccaagtgattaaaaaccaccactgtccagcagtatttttagggatttctttgattttttgtgcagctaattaagccgaccaagtccccttttcccatggggactttggtgtgcaatggttgcaaacagcagcctccttggtagtgtatgtagcctattatctatatgggctgcctcaagggaccttggagacaattttctggcagttggtaatcaggcctctgatcacaatgttgtccctgatctaggctccagacagggatgcgtggtgcctttgggaagccccagggcacagtggccagggttcacattggccaggtcatcatgtccatccgaaccaagttgcagaacaaggaacatgtgattgaggctctgcgaagagccaagttcaagttccctggccgccagaaggtaggtagtggtatttaagttcttctgttttcttgctctggtcctccttgctgagtttgttattttctatttccttctagatccacatctcaaagaagtggggcttcaccaagtttaatgcagatgaatttgaagacatggttgctgagaagcggctcattcctgatggctgtggtgtcaaatatatccccaatcgtggtcctctggacaagtggagagccctgcattcctgaaggcttcaatagttctcctataccctaccaaatcgttcaataataaaatctcgcatcaagttcgcttatgtttttgtttctgattcttaaataccatgaggt

SEQ ID NO: 35890 - DNA, 1171 bp, Mus musculus; identical to SEQ ID NO: 35889

SEQ ID NO: 35891 - DNA, 1099 bp, Mus musculus
ctatggatggtgctatgggaaatgaactgctgcctccatcctaaagtggatagaccaggagtgagccagaatctacttcactagggtttggagagtttgatttcttctccagagaatggattaaggagaacagacctttctctacaggagatggtgtctaccagaaagggatggacttcattttggagaagcttaaccatggggactgggtgcacatcttcccagaaggtcagttgggtgcttgatcagggccctccagcattcatggttctaggcccaagctttttctctgtgttctctcattagggaaagtaaacatgagttctgagttcctgcgcttcaaatggggtaagtattgctggccagcctgacacagctaacttccccatccaaagatggccccttgggtccttggcttcgttcctctctcaggtgggtgtgtcaggagcagtagaaaagggacaggcggtgagtcaaggactaagttccattgagagactgtagaagtgacattggccagacgttggcagggaagtttggcccagcttgtgccaatgctttggcatttctccgaagtaggaattggacggctgattgctgagtgtcatctgaatcccatcatcctgccactgtggcatgttggtgagtcatggattgggggtagggaggggactgtcttagatgtcgttaagggggatttcaggttgttgggtagctgagagaagtacctgggattctctctggtaccctgcttctcccaatggctggctttctatccactgtggtacaggaatgaatgatgtcctccctaacagcccaccctacttcccccgctttggacaggtgggtaggcactgctgactcttgtctatctatttccctgctaactgccctgtgtttccttgtccatactatacaggattggttgaagatttgctgagcatgagcatgtagtaggggagctaagtggggcttttctggaagcaagacctttagaaaaagaattgaaatcaggcgggggtgagggacaaggtagagtgggacaaattattgataggatattgactagactggcccttggataccatcaagcccaatt

SEQ ID NO: 35892 - DNA, 1227 bp, Mus musculus
gttctcttgtcactcttcagatgaggtcatcggacaggtactgagcacactcaagtctgaagatgtcccttacaccgcagctcttactgcagtccgcccttctagagtatgtactcttctagcaggggccctggggaatgagggtgtgaggcaatgtggtgagtgtgactagagatgaaggggtatgtcacaggcaggatctctcaggaggcttcagtttgggggattaatggacagaggattgcttcctccatccatggtgccttttttcattttgcttatgagccactttgggcagtgtgattgttagtttagggagatggaatatcaggtctagggactttcagatggtatacagggtaaccagtggggaaggaataccagtccagtggattaggttttgtttttagggctgttgagagaaggcttgttggatgtttctacaggtggcccgtgatataaccatggtggctgggggtctaggtcgccagctgcttcagactcaggtggcatctcctgcgatccatcctcctgtgagttacaatgacactgccccaaggatcctgttttgggcacaaaacttctctgtggcatacaaagacgagtggaaagacttgacctccctcacctttggtgtggagaatcttaacttgaccggctccttctggaatgactcctttgccatgtaagggttataggaagagaaggaagggctatcctatcacacatggtcttcctgtcactgtgagctcagtacaggacaaggatgtgggattatgtttgtgtggtatgttcaccaaggacatagatgtcacagtatcgcagggtgatattgctgggaggttactggtgagggagcctcttaagagtttggccttctcatgtttttttaggtattggttgttgggtcctgagcttttattaccacatagtcccttgggatcctggaccgtttttgaacccaacccctgggactgcatgtaggcaaatatcaaaccaactgttaaaaccagtcctaggtttcctacccttgaaacctcagcaggcagctgaataaccccaagaaggaggcctaggaaccagaggaaggaatcctaagttggagatgtgaaacctaattgtttcacaactgctcctgatttgcttatgactggaactttacttttcccatatggtaaatggggacactgtattggcaggtgactataaggatggatctagggcagc

SEQ ID NO: 35893 - DNA, 1333 bp, Mus musculus
atgcttttcatattcacctatggtctgcacatgatactcagcctaaagaccatggatcgctttgatgaccacaagggccccaccatcactttgacccagattgtgtgacatacacctgagaggaattgagggagtattggtgtctaggttgtcatgtttctgttttgtgacacagtggatggaaaggtttgtcctcttcctactatagcatgaaccctacatacgccaccctcagtctctcttgcttcctctttaacccggagagggactcccctgtggctatcccccatctctaccaacaaagtgtattcttcatagatattagataaatcttccaggcttcatcatcaagaggggaagggaccttaattctagggtctcccctttaccctctctccttatttattcttgcccctctgctattattccttgctgtttatagtgcttttgtgtagtaaatgctcactccccaagctttatggagcttccagcaacagccatgaacttgaggttccttgaatttgcgaggtgtggaaagactacttgactgtctgtccagcttagctgttatgttttttgggggggaggggtgatgtgttaagagtgagtggtacactggggtttatttctgtggcctgggaaggaagaaaccatcacgaggattggtgaacaaagtgtgctcactgggtttctggattattcccataaagactgcctgtcaagaggccggaggtgtgtgtggggggttgctctgttgtttccttcctaataaaataaagacgtgttgccttgtgttgggcttcgtgtcactcatttctgcactgaacagtagatttttttttcttgactgaagggaagaagtgctcagatgtagtccagtcatgcaagaggtgagagaggaagggtgggagggtcttcagtaagctgatactcttaacaaacctacttagagtagaggcttgttacttttcctggccttgggaggaatcctgacaatggtagctccgctactgtgcaacaacacacagcagggcttccataccttgtgtttctcccagggggcggtacgggagcgcgcggggcggggcggggcgcgcgcggctcccgcgcaaggatctttcggaggactcagcacctgctgccggcctgccccgccccgtatttttctgggctcacgaagagccccgataacccctgcagtcattctggtgctgggacccaggtgacagaagccctcccagaaaacaagcaaggaaatgatgactggttgggcggggcggggccagcggagagagagagggactcattaacgctgcgtagggatcaggagaca

SEQ ID NO: 35894 - DNA, 1333 bp, Mus musculus; identical to SEQ ID NO: 35893

SEQ ID NO: 35895 - DNA, 1706 bp, Mus musculus
cttctttcttttcttttatttgccccttaggtttgtggctatcagtgatttatatgagcccattgatgatggttcagagagtcaggtaaaaatgctgtcccagtcagccttggttcttgcagtctatccaagatcctctgcctgacttccgtgagccctggggttctgtctatttacaggtgttctgttcctgctcctatgatgctaccacacactttgagacaacctgcaatgacatcaaagatatctacaaacgcatggctggttctgcctttgattttgagaacatgaagcgcaaacagaatgatgtctttggagaagctgatcagtgattgctgactcccctcctccagcccctgttcccctctccccaacttgtatgtccttctctagggcaggggagatggtatggctaggcatccttgtttccagcatcttctgcttcccctaccacattccaatcacccaccttattgattttattcactgaccatatccttaaccttagggatggtttgggagatgggagttggatagtatcctctttcttggtctgtccttgttctagggaaagagaactttgtgtgtgtgtgtgtgtgtgtgtgtgtgtgtgtgcgcgcgcgcgtgcgtgtgtgtacgtgtgtgtacgtacgtgtgtgtgcgtgtgtacatgtgtgtgcatgtgtgtgtgcatcgtgcacccccaattttgctgtttgggaaggagtggaggaaaagctgacccccacccccactgctcttagtcccaaatgtagtggcctttggagatacccatctcctcccccaactcttaggtgttggagagaagggaccctcccagcacaaaattgcattcctcctcctcctcctcctccttataatttattctaatttattaactttggagtaattgtctgagccctcagcctttctgtgcagcctagggctgtagagtgagctgccctggcctctcccagtgctggcaaagcctgggatgggagaagatttaggtgtgaccccctctggaggttgatctgttttgaatttcttttgtgttgtgttcactgagaaaaagtaatgtgagcaaagcagaaggaggtaggaaagtggatccaaaccccagtgtaccctgccccatgccttttcctttagtggtgggaaacccttaccttgcaaagtgaatgtgtccccttccccaagctctagtatatttcacagaaaacaaaaacctcccaataaaactattgaaacttaagcctggctctttaggttctctgctttaaggctgttttgcaggactggggcaatttagcttctggactagaactgtatccgcaaggatcaaggcaggtgaagtaggtcatctggtgttggacgggtcatcatttactagtggtttccaaatcagaagtcagtgtggaggttttgggttcaaggctatactgacctctccgaagcagaatagcacaggtgagatggttcaatgcataaagatattttctatgtgaccctgagtttgatctttggagcccatgtaaaggtggaaggagaaaactgattccacaatatgacctctgcacatgttcagtggcttgtgcacaacatgtaaacaaacacatttaaatttttatgtgtatggctattttgcctaggtgggtgtgcacaacttgcatatctgctgcctgcagaagccagtatctccagga

SEQ ID NO: 35896 - DNA, 1196 bp, Mus musculus
gaggccagcctggtctacagagtgagttccaggacagtcagctacacagagaaaccctgtctcggaaaaaacaacaacaaaaaaatccaagcaaccaaatgtgtcagtgtgtgaccaagcaggaggaaaaacagcctccgtgggaaggggtacacctgactgagacatggctctcagttccatcatccaagttgggagcagcgcgctcagccttgggactaacagaaagaagttaggaggaatggagggccagcttaagatagcatttaactttgagggtgtacaggaagctagaggacccagctccatgtcacaaggaaccagcagaaagaactggtgatttcgcattgggtatgggatgaactcgtccggcctcctgtgaggcggggcgaggtgcgatcacgtgtcagagccgcgggcgtagggcagggcctgcgtccgcacgttccctggtggctgacgtcacgcatcagctgactaaattgccgccgccactgccgtcgccgtcgcctccacgacttctccaagcaaaagtcactgttgccgctgtcgtcgctgccaacgccgccgctgccgctgccgctgccgctgccgctgccgctgcctccgctgaaaccgccactgccttcgctgaaaccgctgctgccaccatggcccagtacaagggcgctgcaagcgaggcgggacgcgccatgcacctaatgaagaagagggagaagcagcgtgagcaaatggagcagatgaagcagaggattgcagaggtgtgggccaggccggggcacctcagagcttgcgctccgcgcggaccccctggcggtctcctgccactcgtctctgggagacctcaacagtgggctatgagtgcccggagggcgggccccgcgttggtggcgagacttgctgtgcatctctagtaacagaagtcagccgagacagtctaatctataaaatgggctcagtgttggtccatgtcagagatggggagcacactgatgttgggtgagactccttggcactcctcctgagtacagagctcccagccttccaatgcttattgggaagaccccacttcctgtggagaggcacaggggtatgccactgagtctcactcattacagagtactagagtttctcccagggtttgtttagtgagtggtcgctgcattcagaagcgcgataccaagctgaccacagct

SEQ ID NO: 35897 - DNA, 1150 bp, Mus musculus
ggtaggcagtagaaggcctcccttggcttaaattcaatggaaagtaactgacagtcttgacttgggaaacctctgtgggtagcagggtgggtctctgctttcttggaagtatttctttgggctgttgttttttcttttcaacttgaagtatacctacttctgcagatgaagaaaggcaacacgatgcagcagttcctacagaaagcactagagatcttgcggaaagacttcagtgaactcaggtgagcagaggatgcactatgtgtgcctgtgctgtgcatctgtgaggaggctgacttcccagccagggcatcagacaaccctgctgactgctccacagctgggaaggcggaatgctgggcactgaaatcctcaaaaaggagagctgtgctcttttttcttaccttcctgctgtagaaagcataggtgagagagccctgccttggtggtatggtccagaagtggaggacactggaactcccgtcccagattcattaaactacacagcttcccttaaactttaaggcttaaagcactgtggccagcacttcctggccccttgtggccactctgatgacttctagttgttgtcctctcctctttttcctgtaggtcagcaggggtggaacagctcatgtacatcaaggaggatttaatcatcccccatgtgagttccttcaaccctgggtcatgcactctgtgctttcataggagagtcaccatactgctgtgcactcttccagggctgctgaacgcagtgatacctgcaggtagaggtatggggaatagtgggtgataggaccccagaaggattatcaagctggtctttctcatcctctgctcctagcatcacagcttctatgacttcatcgttaccaaggcacgaggaaaaagtggtgagtaattctatcttagttcaccctgtaacttgctccaacatattgaaggagaatagcatggccttgagcttactgcttctctcctacagggccactcttcaacttcgacgttcatgatgatgtacgactgctcagtgatgccactgtggagaaggatgaggtatgatggtgccatggcactgggcaggcaaaggtgccctgaacctgtcagggaggttaaccttggggagaagtcaacagaaaggcaaggt

SEQ ID NO: 35898 - DNA, 1119 bp, Mus musculus
ccctctgttcagcttacctctgcgtttctgggtgaatgtgatcaagaatccgcaatttgtgtttgacatccataagaatagcatcacagacgcctgtttgtcagtggtggcccagaccttcatggactcctgttctacatcagagcaccgcctgggcaaggactcaccttccaacaagctcctctatgccaaggatattcccaattacaagagctgggtggagaggtgggccctgggatactgctgtgtatgcctggtggcaggcaggaactgcctaaacagcctgtctgaggctggccagatacaagaaaaagcctcagaggctggccaaacactgatggcatgagttttggcatttatgacctgtgcatgattcactcacccaaggtctctataggtactatcgagatatcgcaaagatggcatccatcagtgaccaggacatggacgcctacttagtggagcagtcccgcctccatgctaatgacttcaatgtcctaagtgcactcagcgagctctacttctatgtcaccaagtaccgtcaggaggtacgttgatgtacctcatggacccccagttgcatggctctgatgatgatacagttaggggcaaaggcagggagatgtgttgagaagcacacaagcatgtaagcaagatgggacaaagtccatcttatatcttgtttacagtccatcccttgcctagggccagcatgggcaataatttctttagatgctaggatttaaggaatacaggagacaatgcactagctggaatatagaggtcccactggataaaggttacaagactggaaagtgagaacagatgtattctaagcactcatgttaaaatattggatgtggtggcatgtgtgggtatgggtgctggtgagtggtttagataggcagattcccataactcactagtcaatcactgagttctatgttcaatgagagatgtcaaataataaggtggaggggctggagagatgattcagcagttaagaacacttgctgttcttccagaggacctgagtttgattcccagcacccacaaggcagcacatatccctctagctccagttccagggaatctggtctccttctgtggcttctgaag

SEQ ID NO: 35899 - DNA, 1195 bp, Mus musculus
cctcacagacctcttctttggttgatctgggtcctgtttcctgttctggttcctttgtgacactgcaagccttggctcagcctctggcgtctcacatttgctgtgtcaggccccacttgtcctaagaagagatcctcagtaccagcagcatttggggttggatgatgcatctgaagctgccctcagattggccaggccaggccaggccagggcaatatccctcttcagatatctcaggagtcagaccacattttcatggggcctgttgtctctgagagaactataaccaggctgtgattgggcctgatgagggcctgggcctctgggacattcctcacgtccctactgccaaatttcctcagtgttgtaggcacttgccctgaactctctcagcctcagctgccctatcacatgcccatccttaagggccaaggtggcagtgccttactgttttgtgtttcctgcttcccctgaggaatctggccctgtctaatggtcccagacccccagtccgctctccttctgttgcatgagtttttcttcgttgttgtaattttttcctaattaaatgttgggaaatggggtcagtgcatgtctttgtctttggagaaagtgggtagacctgttgggctatggatgaactagattcccactgaggggaaaaatgtaactcacgaagacttctgatgatttgaggaaggccatgtatagtccattagacaatccttgtggctctagtttcaagactgaataaatctgcttccttctccttgcatgtactgtttccactcagatatgcccagctccctgcttttgccatgacccctttagcccattattagttggagacaaagagatactattaagaaataaggcacatgtctccattgtgttaaaaaaaatcttcagtgggggctggagagatggcttagtgtttaagagcaccagttgttcttccatgggactcaggtcaatttctagcacacacatagtagcttacaatttgtgtgacttcagttccaagaaatctgatgtcctcttcaggcttggtgcatagacatatatgcaggcaaagcacctatacacataaaataaaatgaaactaatttttaaaaccctcttcaatggctgcagttgtacccaaaattctgaagatgtggcaactcattggactataattaccattgtactgaac

SEQ ID NO: 35900 - DNA, 1195 bp, Mus musculus
tactgttatgagttgtaatgtaaatatctgatatgcaggatatctgatatgtgaccccaacttgggtcaacccacagattgagaaccatggtcctaaatgctaagatttcttcaggcatcaccacaccaggccacttgacagttttttggtttgatagtgttttggtttttgttgtggttttgttttttagaaaatatcaccttaggtcccttttaggaaactgtagggacaacttggcatggtgatgcactttggaggcagaagctgaccagatcaacctataaatccctggagagtcctcctgcccacccccaccccccccccccaccgctcctccccgccccgcctccctcccccccccccgcccctcgcccctccccggccccaccaccttccccgttcgcgcaggcgcgtgtggaatggcagcctgtgcgaggggcggagcttccggaggataaggcgggttctgggccgcagcaatggcagaggcggcgggctggtaacgcgaaggtgggttgaaaggaggaacagcagcagacatgcagacagcacacacaggtttaagccacactgcagatggcgccgatggtcagactagccgctgttgtcctggtaatgcaggcacaaaggcagttattcccagtggagctcaccctgttgcaagagcactggaagcctcccgaaattccagcaaaagcatggtgcctttaacccaaaggcctggaacccgacatcacagattgtatcctaccggacatggacatatctgcgggatgcttgaaacagggaagcgggtagtctggaggagggtaaaaaaagaaagaaaagaaaagaaaaaaaagcagggaggagggaagcagagggacccgctgattggggtatggcctgggcatgaaaagttccttgacaacagaggaggggcagcagggtggagggaaatgagcaggaatggcccaagcaatgtggaagatatagcctggggagcttagaccagatgcgatgattttagaggggtaaggaggcaaagttgattcaagatggtgcctttcctgagtctctaccagctccctcttcgtgcctttcccgacctctttggaggcagaaatcgcctgtgggtccctagttccagatgtcgaaccacatcgaggactggtagggaaggagcttaaagtgagcggctgcatgctggaggtg

SEQ ID NO: 35901 - DNA, 1489 bp, Mus musculus
ggccacagctgcatgttgcattaaatgtgttctcatgtcgcagtttggctcatagtgataataatagctggtatgtatccagctcttgctaggtgctaggtactcaaagtacatggcctgagttctcttctgcctcccacagcaaagttgaggctgcactgtagagacacctagcaatggcttgggacagacagggtccaagtctagccagcctatagaagtgcctctgtaggagaaagagtgtgctgttttcagagatgggtcttagtattcccatttagcccactcagcatacaccctcaaaagactccctcaggaaaccactagttcctgtcacctgccctctggtgtgtcccttggcaaatctctataggaggccaagtgttagctatccagggcccctccactgctgcagccagtgtgctcttgaataacaagcaggttaaggggctggaggatcagaaagataccccagctccatcatagtttgagtcatgtttctatgccactttggtccccaaccaaagtgaatctgtcccatgttaggcactcctctgacctgaataagtttcctttctcctttatcagttcaaggtgggagtctttgctctcatcacctgcagttccaccttgtgttcagaaagcaaaagtgaagtgatagccaagcatgggccactagatggagtatcctgggcctttgtagcatagctcttctctggagcaccctatttgcttggctctttctggaagtaggtctcacccatgagggacaacaggtgactcagaaaggcagtgtcacaactagaacactctgccttggtctccttatccagtgctcacccacagtatgaaatggatgcttcctctgccacctgtatacaggggcttttactttgcacaccttcattgcttaagaagaaactcagggtgctgagaaagatatgtatgctgaaggctgtgattcctctttttattgtacctatgcctgggtgctaaaggtcatgtaaggactagttcctttgaggaggaccccctgggagcagtcaagctggaagatagctacctgcaagacactactgtccctctacttttgccaggaaagccactctactatgaatgttattggggctacacttgcctttcttgcccaagggcctcctgcatagaccttgtcggtcaaatcttgagtccttgtacagaaatgatagaggcctgagggggtgtgcaggtgatagaccctggtactcctaagacctggggtatcatatcagggacctgcttgtgaacatgtgtatagagtgccagctcagataataagcttaccagtgaccttgttcactttgagtcagggaacgtatttgtaaaattaacactaaagatgcatgtgagtcatttcaccaaaaggaactctattaataagctagactgcttttggtttccagtaattggtttaaaaacacagtaaatttactggcttataaagctgaaa

SEQ ID NO: 35902 - DNA, 1234 bp, Mus musculus
gattgatcgagaaaagccccagcccatcccctatgtatatggcaggtaagggaaggatgggagctaagagggccaagccaaatgaagcagggcagtgggaataccaaggataaaggtcactcatgtctctcctttacctcccagccgcggccccacagaggcagatgagctgatgaagagagtgggcttccagtacgagggtacctacaagtgggtgaaccctcacaagctctgagccctggaagttacaccatctatactctgcctcttctggccaccctttctgcatcttcccttttcaccatctaaccctatattaggactattgaccccatattggaaggactttgggaccataggccttagatacacattctagttcctgggcttggaccgccattttgtcctatgctgctgccactgccaccaccagtaaacccagctacattcctcaaataccaggcatttaaaactcattgtagggtttcagggccaccactggccctatctgagccacccatctttccacaagacctgaatcacctcccttccagccgctgcagaaagaatgcctatcagtctgcccctggactccttaaggagttaggaacaatggggaggagccttaggcctcaaagggacaatgaccaaaccagacttcccagaggctatgggcaagctcctcaaaacttgaaggaagtggtcaaggacacctatgtgagaggacctgcccatggccacactagcctcagtgctactagacattcctcctcaccagatggaagagacctcatgctgcctagcaatattttgggggctctagatgtcccctgaccaattccatactccatggtcaacctcatcccacctatgggcagcctccttaccaaaggaaggcaagcacagcagctagaattttcctatcccaaccctgccattaaatcctcaaaacagttttacctgtctccttgttcttttctccttgcatccaggatcatgaaggagagacctattatttccccacttcccacatttgttattcagggttctataaaagaacagaactgataaaacatatactagagttgcttagaagctacagtccaaatagtccaacaatggctacatattttgaggaaacacctgaagctgatgctagagcagtctcttaatttgaaatcttctgagggctcagtaggactgagaagttttataactgttgctttataccatg

SEQ ID NO: 35903 - DNA, 1117 bp, Mus musculus
cactgtccttagtcctacctcacctcccttgggtgacttgaagccaggcagactgtcagttgcaggctgagccaaaacaaggagagcaggttctatgtcttgttaatcccaaagagaacaagaacaaacagctctgggtgtggggcaactgtgactcagcagaccagtcccctgccaccaacacattggctggagtctgtactgattcctcccagttagttggaatttgatcataagcaaacactgtctgcttagaaaagtctacaagccagggttctcattgtttcttttagtttctagttcccagcaagccagtcctttccagagtgtgtgaggacaggataaaaccctctgaacatgagcagtaacccacatcccactgatggaagatcatagaggcaggcattgagagcattctgaggaactaagaaccatcctggggggaaatcctggcccagaattggacttgtctatgctgggctttgtgggacctataagggcaaccatcttgcacaacagagtaaaagctttgcccagcagagtgacttgggggacagtaattaggccactcaggtggccatgcttggtatcacatgaggaagtgacagatgaggaggctccagagcaatagaagcccagctggcagcaagtcttagacattttcctaaagatagtcatagcattgaagttacttactggccattgggctcaggctcccagaagttcatatggaaggtggtagttatcataggaacccactcgccaatgctcaggactttaattctgagcagttgacagacatgggcactgaattgctcgctcatgccaacacagggtgttagggtttggcaacagtcctctatgaaagttttgggaacccagaacctagaaatgacatgcacacaattgattccatggaccggtcactcagcaaacccctgagaacaaacattcaagccatgggaatccctgagtgcccataactatccttatccagaactgccatttcccatagaaatgggctcatcagtgcagctacatggttaactctcttttgtttgttaatatgctaaccaagtctactcagcctcagccttccctgagcctctgctcccct

SEQ ID NO: 35904 - DNA, 1186 bp, Mus musculus
cgctaatctacaagtttttaacccatccctttgtatcccgcactttccccgcattgggcccatgaggactagacctttagaagagaagggactttcggggatcacccaactgggccagaagagagccggagctgaactccatcatctgcacaatcaaacgtgctcagttcattgtggagtttctggcagacacccgagtacgatacgatggtcccatatacagagtgtgatgccgtaaccagattttatctagctgcccacagtggatgtcctaggtgaattatattaaagctttagtactttcgtaatgtacagcccctagcgaaggcaactttggaggttatggctggagctcagaggcagcagtttctgaatctccgaatgcatgtatgctcgcgcgcgcgcgcgcgcgcgcgcgtacacacacacacacacacagagcattcccggccagtggttttagtaatcgtcaccagcctggtgagaacccaaaagacccttggataaggttaagttgtcaatgctctttcgttctcctaccatatcaatgagtcttttcttccaccagaaaacatcatggcagagcaggtggccctgagccggacccaggtgtgtgggatcctgagggaagagttgtaccagggtgatgccttccaccaagctgatacacacatatttatcatcatgggtgcatcggtgagtctcccttcaggccccgagtctaaaagatgaaatatagccttgtgcaaggcacttctctctctctatctcaactttcccaattgacggaactgctgaggtacccacaagttctactaggttgaactctatggcatatactccacctgtgtgtcctgatcatcacagcagtacctgatatacatgtacttgtgtcacatctcagaactctgtgctgagccattgagtggagaccagacttggaccatcacaggtgctaaagcaccacccagtagcacttcttcctcctggatgaaaaaaaaaaactgatgtgcaatcagggaaaattctgattttaatgaatctgtaatttgaaaaatattactgttaatttcagtggaagaatctgaggtcctgcctctccctcttttctttctacggcatgaagttccctagggataaacacctcctctttgccatatcttccaaagcctactgcaaatttctg

SEQ ID NO: 35905 - DNA, 1212 bp, Mus musculus
gttttgactattacagaagtgcaccccttgttccacattgattgttagtgttttggggcctagaagctgttttatactcctacttacccattctttactcctagttttttgactttggaattatgactgctttgtcaacagaaaggtatttcacatgtatgctttcctttttctagccccagtgtgctcttgtttttgccaagcacattgttaccttctgtgaatggtggtggccatagttcatcacactcctggagtttgtgatcacatgttcttcaccagccaaaatgtcctagggaaccatttagcagtgactgactgatcacagaaaagggaacacttcacttgttttgcaaggttctagacattttgtgggaccttaccgtcattggtattagacctgcagttctagtaaaggaaaggaagttgtagttgagaaagcaataaatatgccttgctcattccttaggtctaaatccttcctgccctcctgtaagctttcatggttctgagtggtatctgtgaatccatcccgggggcttttatttacatggtttctttcccattaagagtgagaaggctaagtagaattcagattataaaaaaggatttaaaaagtaatcctgagctgggggctttctcggaattttcaggggatgcagagtaagttttccatttcctaattcccaggtatctatcagaaagatctttaggaaaatgttaaaggaacaaacaagttctttgcttatgtgttttcatttaaatacctaatctataattttcctttaggaatactattggtttaggttgagtccagttttgtggtggtatatatcacttttctatagctgctttaaaatttttcctaaacttggaagagcaagaacaacaacaacaacaacaacaacaacaaatcactctttcctgtctggaagccacatattaagttttttctggaggctgtgagaatcaattccaggcattctcttaactttcagtggtttgtggtagtccttggtgttgcttggctcatagacccatcactccagtttctggttctagggccttgtggtttcttcctctcttctgtctcataaggaaaccatgttgtgcatgtggggtctatttgattagattaaggaggatctccagttcaagacccttaactcattccacctaccaagatcctttccccaaataaagtcttgttct

SEQ ID NO: 35906 - DNA, 1145 bp, Mus musculus
cacctaacaaagttcttcaggaaaacagagaaagattctcaaggatcatgacctcatctttcagtgccatggaggtcaaaattaaggatgttctgaaaacccagtgtgaacagaggtagggttgttgcttcttgtcactttgatcccagagctgttgacagttggtttgtgagcacaatgaagggggaatagccagtggccccactggctagaagctttgttggcaagtgaacatgccttgttttttctgtaggacagactttgttttgtcttataccctcccgttgtactgaagtcagtcatctgcatttcctaaggatgaactaagatgttttgacacagggcagttgaatcagtgtaacagtaagtaaggtgtgggcattgtgtgaaagtgctgggtgcattgagcttgaaatcctcaaatcatccatcctggagtccttcatctcttcagtgtgaaatgaaatgaaaatctctagcctccaatgttgtacaggtttccggaggagccctgttcaccatgcaggtatgctgaaatcctcacaggtacagtgatgaagagtgggtaggtgtccacagaattctctgatggtcgtgggtgtgcatcctcattggacctatctttataatgggaaaataaagcagggattgtgctcgtcagagagactaatacttgtggaatgctagtaagacaatcctgagttttctagcactaaaagctgtgaagtgactcctgtctcggccaaggagggacacgtgctattagggtggtaggaactaatccacctcattttccatttccctgtcagaatattttagatctcctttcccagccttgcatttagtgaaggaaagtcagtcgtgctgtgtttgaatgggctttcttcatgtcgagaaggaatatcacagtgttcacctttgtcttttacaggcagaaactttgtcaggactattctcttcagtttacaaatttgagtaggaagttaacttcggatgcatacaaactcaagaaacaggcttagctttaaaggagtccatttcctcagcatcagaggtagcaacagaggcttcctgcagcaggtctgtagggaaggggcaggacatgagctctgggagttaaggagggtggttgatgtggaggggag

SEQ ID NO: 35907 - DNA, 1208 bp, Mus musculus
gtgtgattctcataatactttggagcacaaaagccaatatgaggggagcagtataatcatctgggtgaagcttctagtgctgatgattgcagctttggtgcctggatcttctcctgtcttcctcctgtttctgaagatgccccgttctgttaaaatccaaatataccctaggatttgtgtgacagcagtgcaaatatttctgtagggaactccagccctcgggtagaaatggcaggctttccttggtagcatcataattactggttagcacacattggtgttggtacagtagattatcatacctgaacatcatctccccaaattagaaggcacacaagtgggctattgttgtcgtgtccagataaataattagagaagatacaggctttctttgacattctgctctgaaatgtgttcagtgatggagcctatgaaactgaccttcagcctccaaaggcagtgtgctcttaatagttaaagtagtagaattcatcaaacctcccgagtaagaaagatgtgagtaacgtggcttgaatcagtggaaatgccatttgcagacaacatttacaaggtctttctattaaatgtgtctgtcacactaagaggtgattctgaacatgaatacagcttaattcaccatggtttattaatccctcacttgtatggataggagtaacttagaatgttttgtttgtggaatttatcgcacatgtagtatgggatcatcagggatattatatatgaggtctcctgtacagttaaagctcgcatcctgtgatttcctgtatgtataccctgggaaatccttacttgggaacgtttgatttaataaacatgaaatagtttcagacttgttggcatgagtcatttaattgcattctctttctgacatccctgacgtttcaccccttctcagacagacatggccccatgccatgtggaggtgtgctgtcacctgtgttcctgcatggggccagtgtagtctaggccacttgtctcattgtgtcccgttgtgtagaagcattgaaaacaggctgtgttcagcctcccccattttctccaagtggaattccattcctccagactgaatgagggcttccctgctgggatcattttactgtctaaagtttgcattatctagaagaacttccccctttgtgcaaactacctgtgaccctatgggcctttagtattatttctttaataat

SEQ ID NO: 35908 - DNA, 1211 bp, Mus musculus
gctccacatggcatacgtgtagaagtcaaaagataacttgcaaagtttgttctcaagtgtcgtgagttactagtattgcagttttccctagtatgtaggaaggcttagtagtgtgtcattaataatgggaacaacatacatttatgggcttgaagggctacagtggttggtggtgttatttactgactcttgttttacttctattgatatgttattaaacttatgttattgctttctagaattttgataagctaaatgtaaggacagcacactatacacctcttccttgtggttcaaatcctctgaagagggagattggggactatatcaggtaggcatgctctgtccaaacttaaagtcttttgaaactgatgctctcactgaatttatttgttattcaagggagtagtagtggcagcttagaacagctttgtcctgaatatataacctaaatatgtgatttgcttttctttttatgtcttcatgctattttttttagacaagaacaggaggtgattacctttttttcttctattttaggaccggtttcattaatcttgacaagccctctaacccctcttcccatgaggtggtagcctggatccgacgaatacttcgggtagagaagactggccacagtggcacactagatcccaaagtgactggttgtttaattgtgtgcattgaacgagccactcgtttggtgaaatcacaacagagtgcaggtttgtaaaagagagagtagggggctatacttgtttctgttcttgtttcacttctacattttggctcttagaaactatttctttagaaaaaatcttaaagcacgagtgtgaattggtttctgttgttctctgccaaaatctggtggttctttaagagtttgagacactaagcatgtggatattgaatcaactgtcctgttcctagcgctgcggcaggtcacttgtatgcttgctggttctgctctttattgtgttcttggttttgcagacagggtttctctgtgtagccctggctgtcttggaactcactctgtagaccaggttagcctcgaggattcacctgcctctgcttcccaagcgctgggattaaaggcgtgcgctaccaccacctgccatgtttactgcttcttaactcaggtcatgtttctaatgtttctatctcaagtctcctttccccattttcacccaagaaaattctgcttaaag

SEQ ID NO: 35909 - DNA, 1733 bp, Mus musculus
gcaaaatttgtttaaccccaaatgtcttagatttttgaacagacttgactgtgcaatttgtcagatttcttttgggaacagtagtcataaatgttttgtcagtgggtacattgaacttacttttactttctctttctttaggacaacgacaccaccaaaaagaaaaagaagaagaaagtaaaagtggtagaagagatgtctgaatagtttaagccacttctggaagcattatgtccagctgggaagaaaaagaaaagccttattggaaaaactttttgttgagggagaacagaggtcccagagtagaaagttctggtatacttttagctgccacttgtgacctcagtggttagctggtgtggccatctcatcccatcctgtcctgttttaaggatatgagagataaaatcaggcctttgccaccaacccctctgcttgcttgaggaagccacacctttagacatggcatggcctagtaactatctgcagctatttactaatgagcattttcaacaatgccatagatagtcctctcctactttgctttttaaaaagttggtaaaaattaaatctgctacataaaatggtatagaaccttctgtgagagaaaaaatgtaattgaactatgttcactgggggactcttatctccagtgttctatgaggactgctctattcaggtattaaccttgcctggtggtatctatgatatttaggctagtactctgtatttttgtgtacaacaggatttctctatatggctacttgtgtttcttatggaagccaaagcattcctgtaccttcctatttgttttcttttaaagaatggaattgccgggcgtggtggcgcatgcctttaatcccagcacttgggaggcagaggcaggtggatttctgagttcaaagccagcctggtctacagagtgagttccaggacagtccaggctatacagagaaaccctgtctcgaaaaaaaaaaaaccaaaaaaacaaaaaacaaaacaaaaaaaccaaaaaacaaaaaaaacaaaaaaaaaaacaaaaaaacaaaaaaagaaaaaaaaaagaatggaattgttcagaatggaattgttcattgctgaagaatgtaatttgtagtttttttttttttaaaaagtattcctgttagatttactatgataatcttggactggcaacaaaagtgagagaatatttttattaaaagtctgaggtttatgtcctattttgaatttgcttttcctttggctacttttaaatttcctaattctgagtctttcttacattggcactggggcctatctgctctcaagggagatcattactaatccagggttaagaggaaaggggtagatgcatttatattgtactgggcttgtgaagaggttggaggtactccaggtaggaaactgccagttttggtgttgactgcagagggagcagggaactttgcttaaatatgtgcccaaaaccaagaatataaacacaagttttaggggaaattgttaatagcataggcaggtatagaatgcccaaacagcccctgcttttgtaacatgttttaaaccattctcttacgacttaacaagtcctagagaagacgcctttgtgcattgtgaataccagacctatagaggcagtgacaggtaattcccagagatcttatgttaatgtcattgcttggaaggttaagattgggaatggagttacagggtcacgggtactttaacacagc

SEQ ID NO: 35910 - DNA, 1195 bp, Mus musculus
caaacattatattcttaattggttacctagcagatactaggccacaggatggatcaccaccatgcaaaaaaacagatggggaaccagttaatgtaaacttgtttaaatcttccctttgctgctgtgattaaagactgctgcttcatctatggctttcttctttgcagactgaagccctgcagcagctgcagaaggactctgaggccatccgtagtcagtatgctcattactttgacctctctttggtgaataatagtgttgatgaaactcttaagaaattgcaagaagcctttgaccaggcttgcagttctccacagtgggtgcctgtctcctgggtttactaagcttacagaattggcaaacatgtttcagccagcatttggaatgccacctccccgcaccccctcccttgcttaagccaaaagggttgcttcaacttttagctctgctgttttcttactcaggctcctaaaggggtgaagctttcctactatctacatttcaaaatgatctctggaaaattgccataagaataaccaaatgcaatgctacatagataaaccaactgtccccctgaagcctgagctcctttgctttcaactatagaatgtctttttactctggaataaatatcttctgaaaactttctaaaatgccaaaatcaaacagctgtgcaatagaatgtctgctgtagggaaaatcttccaaagcaataaaaatgctgctgtgttaaagtacccgtgaccctgtaactccattcccaatcttaaccttccaagcaatgacattaacataagatctctgggaattacctgtcactgcctctataggtctggtattcacaatgcacaaaggcgtcttctctaggacttgttaagtcgtaagagaatggtttaaaacatgttacaaaagcaggggctgtttgggcattctatacctgcctatgctattaacaatttcccctaaaacttgtgtttatattcttggttttgggcacatatttaagcaaagttccctgctccctctgcagtcaacaccaaaactggcagtttcctacctggagtacctccaacctcttcacaagcccagtacaatataaatgcatctacccctttcctcttaaccctggattagtaatgatctcccttgagagcagataggccccagtgccaatgtaagaaagactcagaattag

SEQ ID NO: 35911 - DNA, 1099 bp, Mus musculus
acgtagtaaacgggctttgggacaattcagactgtcaactcaatggcttaaaaccataaactgttcaacacagtgtatcattaaacagatagaccacagcaaggaaatgaaaaagttcattactaaatcttccttatcagattcttctgtgattaaaagcaccactcagacaaatagttctgactcacacattgtaaaaacatcagcatttccaccaatagatctcaaaaggagtccattccaaaacaaattttctcatgttcaagcatcatcctacatttatgactttaagacaaaaagttcaagaattcaagaaagcaataatttcttaaaagaaaccaaaataaataacccttctttagccattctaccatggaatatgttcatagatcaaggaaaatttacctccccagggaaaagtaacacaaactcagtcacatataagaaacgtgagaacattattttcttgaaaccaactttgcctgaagaatctggcaaaattgaattgcttcctcaagtttccattcaagaggaagaaattttacctacagaaactagccatggatctcctggacacttgaatctcatgaaagaggtctttcttcagaaaatacaggggcctactaaatggaataaagcaaagaggcatggagaaagtataaaaggtaaaacagagagctctaaaaatactcgctcaaaactgctaaatcatcatgcttgggattatcattatgctgcacagataccaaaagatatgtggaaatccaaagagaagtcaccagaaattatatccattaagcaagaggacaccattttgtctctgaggcctcatggaaacagtcattcaataggggcaaatgagaaacaaaattggcctcaaagagaaaccacttgggtaaagcaaggccaaactcaaaggacatgctctcaaatcccaccagtgttgaaacgacatcaaagggaacttagtgcttttcaatcagaacaagaagcaactgactatgatgatgccatcaccattgaaacaatcgaggattttgacatttacagtgaggacataaagcaaggtccccgcagctttcaacagaaaacaaggcac

SEQ ID NO: 35912 - DNA, 1637 bp, Mus musculus
aggtggtctgctttcagtcccagggctatggcaagaatcaccagagcaagctggctagcctgcatcgtaatctctaggtccagcaagagatcctgcctcagtatataatgtaagtgaaccaggaagacacctatcaatcttggcccttcatacgtatgtgcacatattcatatatatgtatgtacaataaataaacacattacacacacaccacataatgcaaaaacaaaaagaaatgattaggtcagaatgttggatatgtattatttcatatttctcctgaagtagtcaggagaataataaaatgataagatagccatacagaatgcctatccatgtatgtactaaaccttagatgaataggaagttttgtagtaaagtaacttagtatcaaatcttctgtttttcaggttgtatcatttgtaaagaagaatgttctagtgactggaggattttttggaggctttctgcttggcatggcatcctaagaacttcacttcattgttctatttttatagttgtttgtttcttgccagcagcttctacactccaacataggacaatcggcactcctcttcctcatcttctcctgtgccttcctccctgttgtagcaaatctgaatggctttaataggcttctcctggtgcaaggtcttctcaggccttctcaatttaacacgttggaagagacagtaggtgttaactcttccagtaccctccttacttggttggtgtgtagcttaacaagaatgttccttttcccctatgtaagatccttttccaaactcaatttgttaccttattacatgttacatgaaaaggaaccaaatacatttgcctttaagcatgaaaaaattttggtatcttggtgtatgctttctttttaaattggttttaggctatagaaagagaggtatttatacttactataattatgttgccaaaatggcagtgtaagtaccaacactaaaaatattaaatgaacttctgcaaacaatgcatgaagtaatataagtattatatatggtaggtgggtctttatggaaaccagctgtaagaacttcatgaaatacaacatttaagcaagaatttgaaatgtatttcttttacatacgagtactctatctgcatgttcaactctgtgccaaatcccattacagatggttgtaagccaccatgtggttgctgggaattggacttaggaccacttgaagagcaaccagtgctcttaactgctgagcatctctccagtcccttaagcaaaaattttaaagagatgttccaggcattcagaataagaatagcatatgtgtaataaattattttcatcaaatgcaatctccatcagaaatattgcttaatataaaaatccatgtatactttacattattccataatagctattaccatgagctcaactccaactacaaaagcatcttccagaagttaagtcttctatcatcttcattatacccacagggcttactgcttaatagatttcaaatatttttgaatatattaattgtataaagaaagcttcccgttaaaggttaggtttacctcaaatgaattcttagatatgtagatgatcctttgtgcaatagtatatttttaaggtcatacattaagcataatta

SEQ ID NO: 35913 - DNA, 1154 bp, Mus musculus
tgagaactgtcattggtaaaactctagcttttactatttttgtggataaatgaataaataataaataataaatactgacttgacactttcatcattcttccaaatctaccacttttggtctttgttatcatatactttattatttcttatttccagactgtccctcccaaaattcattcatacgcctctctatacagttacagacaaatccatttctctatacctctgtctgaactccagactcagatttcaagtgacccattatatatttctagtaggtagtcttattgatacattgactttgataaatctaaatatgaacatggttttggcctaatctatattctcttatatgtcttacctcagtgaaggaggcatccatatgcaaaaactggaatctagacagacaaccccaacatctctattaccttttacagtatttgcattgagttatagcagtttgtttgttttttggttttgggttttttttttgtaatctaatcagagttgcaatatgtagaataggtattcgtgaagaggaatgggcaggtagaatatcaaggttctcactggttaggattacttcatgaaaacataagagttccttagccttgcagcaccagagcaagaacaagatctagtgaaagttgtcctgtgtcagtatcctcagaatcagagtgaagaggagaaaatgatctcttaaactaaaatgatggagcaaataagcatgctttgaggaaaattgaagtttttttcatacttgaaacattatatacagatatgtaaaaaaaaagtataaaattattccctgtgatgttaaatagaaaaagttgatatgatcattttaaaagggaattacatatatgtatatattgagagaatgatcagtacatctatatacctccacttcttatctctccccattaagagagaatagaaatggtagttcactagctaatgagcacacctggcaccaaggtactggacttcaaatagtattttccactattagtgaatagaattgagtccagaaatgaatgcatatgtatgtgataaactgatttttaacaaaaatgccaagactatttgaatggggaaaaatagtcttttcaacagctgatgatttcagaactaaatacctacacagaataatg

SEQ ID NO: 35914 - DNA, 1191 bp, Mus musculus
gaaatccatggctgcatcccttcagcagattgtctacttagggaatcttgaaaatgtgaaggcatatctctatctctgtaacagatcttagtgttgtaactggttcccatactcccaacccacttgggagacattctctagatagagaattattaatcccagaaattacagtctggggagtattgggcaggtagaagaatctgacagcccacaaattgtaaagttaaggctggccaacaaagaacccttcataggttggtctgtggcttcaggcacatatatagcaaaggactgccttgtctgctcttagtggaagaggatgcacttaatcctttagaggcttgatgcaccagagaagggatgcccagcagggggaggcaccctctcagaggtgaaggaagggagggggtgatgaactctgggagagggaactgggatgggaggcaacatttgagatgcaaataaaataatttttttttaaggcaggctgtgcaagctagtaagcagtgttccaccatggtctctgctttggttcctgcatcgaggatcctgccttgaattcctgccctgacatctcccactgatggagtttgacctagatttgtaagatgaaataaactccttcccaagttggtttttggtcatggtattttattcgtagcaatagaaaccctaactaagacacaaaatgaacacacaaaaattagtagcctttcatataccataatgaacctgtggagaatgagatcagtctagaaaaaattccattcaacatactaaaaaacaaaacaaacaaaaacctataaatctaagcaagaaggtgaaacatgccatgaaaacttactcactgaagaaagaggttgaaggcaaaaatacttctcatgcttgtgcattgtcagaattaatatttaaacaatagggtaaatgttttgtgtatcagagaaagggcccatttttacaagttccctttccccaccatagaacacttcatccaaagtccctctctttgagtcctgagagtctctcacctcccaggcctctggtgcattctagagggtcctcccacctcctacctcctgaggttgcctgttcccatcctttctgctggctttcagggcttcagtcctttcccccacccaacacagtaactgatcatgttcccctcttcctttccctgtcctcttttccacc

SEQ ID NO: 35915 - DNA, 1758 bp, Mus musculus
ggaactcactctgtagaccaggctggccttgaactcagaaatccacctgcccctacctcccgagtgctggaatcaaaggcgtgcgccaccacgccctgctcttaacaattggtagtatagcaacatagctatcaacagtatttgccactagtatctttgtgatttccgtgttttcttttgttttagctttatgagtaaattataatttcattgttacctttggtattatattttcattttccttgacagttattgcagatatggccagggtttataattgggatgtaaaacgaagaaacaaagatgattctaccaagaataaagcataacactggcaattgaaaatgtgattcaggttttcaaacatgttaaataagccaaggtttaaagattgatctaattttcactgattttttttttcacagcaagattaaaatttaaaaacaccattttatttatttatgaaaacaaaattactttcaaatattttatgaaattaccagtatttttttcatatttccctaaaatgtaatgctgcttttgttttattttatctgttataagacaactcctaactgaaatggccgagaactgtgaggaatgctatggaagctgctgaatactgggcaccagagcagttttctttttctttattggttgatattactctcactggatatggtaaaccttttagaggcaggaaagacatacagttccaatatttgtaagcttgttctcctttagtacttgaagggcattatcatcttttgttgctgttttgttctgtaaatggggtttcatgtatttctgcctaacaagtagcttttataatactctgaacttttcagaaaattgttatttgctttcctacacagtatgagggctattgacatccataacactttgatcccaagtaagtatagtgtgtctacaatgacaatataagggagacttgatcaatgctagagagtactacccattcaaaactgtaagctaaggtaatttttatattatgtaacagttttccaaagcacctcgaacaggaagagtaacataaatataaatctgcattatttgaaaagagttgtaagcttttttattcatgataaaatttacataggacagatataatctctggaaagccattggtactgactgtggtaaaagtacttggtgatacagattctggtaaaaacacatgcatgttattccatctctgtgtagtaaaaagtatacttgtacaatgttttgtacttgtatttcatgttattaaaatagtgatgttcaacctgttgcctgacaattttttcattttaatctttgtcttaatctatatatgtttctggcaaataccataaaataggtaaaacaattatttatattgcattggtctggagacttttaagtccaattgaaatacaagggcagaaccttcatgatttactcatccccccccccccgtccccgtccccatatcgtaatactttgggggtattagacaggagaaagaaaatcccagataatatctttttgttttgttttgttttgtttgttttcgagacagggtttctctgtatctccctggctgtcctggaactcactctgtagaccaggctggcctccaactcagaaatctgcctgcctctgcctcccgagtgctgggattaaaggcgtgcaccaccatgcccagctctcagataatatcttaacatgagtctccacagtttttatgagatgcatttattgtacataactagt

SEQ ID NO: 35916 - DNA, 1146 bp, Mus musculus
ggagagacagagagacccgagctgcacaggccatgggctgggtgggaaggaagtgaggacctggacggacaggggaacagacagaggaacagacagggggacagacagacctgagctgcacaggcgaagaagaagtgaggaccaggacggacggacaggaggacagataggcaagcagggtgagagacaggggactgacagactgacggacagacagacaaacctgaactgcacaggtggtggccaaacaccaggcaggcagggtggaaaggaaggaaggaaggaagtgaggacagggacagacagccgagctgcacaggccatgggcaactccaggcaggccagatcagaagcgagggagggagatgggactgggacagggacagggacagggacagagacagagacagggacagatgggggaggcagggaggacgcactggctgggccaacacgaactcaggctgggcccgggaagtgaggatggcaagacagggagacacggagagagccccagtccctgcacttctacaggtacaacgggagcaggggcgcagatctgagccgctgcccgcccgcccggggacatcactaatgcagccacaccgctcgcctggaaccccggcagggactcgggtccagattcatccccatgaggcacagaaggaagtaagtgagggcagggagggacatacagagacccgagctgcatgggcgacggtaaaggccagtcaggccaggtcacaaggaaggaagaaggaagggagaaccgggagagacggaactgggatgcaggcacggctcgggcttggtccccggtgagaagggagaaccaggatctgggggctgcaggactcttagaagcctggatgggtctctcgttggcagacgccgatgccaggcagccccgggtggaagggaggaggagagagacagagagacagagagagactctgtccctgcttctacaggtacaaagggtacagagcccgcggatctgagccaccggcagcccagggactcagccggctcggccacaccactctggaactctggcctgggttcagggcccagattcgtccacttgagccagagaaccaggagtacagttgcattatttcgccacaaggtggcgctagagattag

SEQ ID NO: 35917 - DNA, 1839 bp, Mus musculus
gaaataactctgtttttaaaagagtgcaaaggtgttcttgctaggaaaaaaaaaacaaacatcttgatttttgtttcctccaaaactaggtacgcagtatcgatggctagaagaatcggagccagagtatatgccctccctgaagaccttgtggaagtaaaaccgaagatggtcatgactgtgtttgcctgtttgatgggcagagggatgaagagagtgtaaaacaaccaatctcaatagaaccaaccttactctccggtgcatgattaccaagtcagctagtcccaggtgaagtgctcatggcttcagaagtcttggtcatttaaaggacttttagttttgattagcaaaactaattaatcgtgacagcctttggagaaagcattttagtaaacaagcaactcctctttcccgtagagctgatctgttcagcacacctgaacatgctcacagccaaccttttgcactctcctcctagaatgctgcccttgacattccggcttgctttgtattatctatgtatcttttccctcctgggatatccatctcttgagacttgcctagatgtgtagataggaatattcttagctcatccttttgctttccacattctagcagttctttctggagaatcctgctctgatgctgtgtggagatgagtgttctttgtttactctgtagtgctgaaaatccgctgaagtaactggctgtgcagaatgtactagaagcttttctcattcttttagtcttaaaatcagtatctttttacagtattctttctacatggatattttttgtacatttaagaatattttgattacatccgacacgtctgctgatttgctactttttaaaaaaggggtcttcatgtaagtaaaacatacaaaagcataaattataggtggaagaaagtggaccctaaggttgcatttccccctcacacccaggctcaaaggaaatgaaatattttgtcttcaataagttggtccgatacatgcttgtttgtttggaaatctttatcacaaaactctttttcagtctaaaatgctgttgaacatgacacttttgaagagagggtgggctcagaatttagacgggaatttgataagcaaagaatgctaaaatgtacaatggatttttaattttacacctataacaaggagatgtggtctcagaaatgggaaagtatgtatgtcggacttgatgtactcttgctctgtcaagctctttgctatagttctcaatatcattatgttaatctaaatctgaaaagtgatgtaatctggtagcatcatagtagtccaaataaaggcatttgcataataattattctctactctcttttgttttaatgatttttcttagtgtggatacatagggggctgtgggggtgagtggggtcatttcaggggatgtctatggccaacagaaagagcattggttccccctggatctggagttacagaaagttggaatctgtttgatgaggatgctgggcatcaaacttcaaaagagcagcacgcactcttaatggctgagccatctctccagcacattgttttgtttttgagacaggtctccctctgtagctcaggatggtcttgaacttaagtctctccacttcagcttccccatgtctgccctgagtctcttcttggtgtttccgccccatagtgatgtgtcaattgtgacctgcatttcctctgttttctgttatattctataaaatcatttgtattagatttgggctttgagggctgaattggagctgtgggactaactcaagttcaaataaatgttaagtataattatttcctctaattcaccagatctccttgg

SEQ ID NO: 35918 - DNA, 1543 bp, Mus musculus
actcagagtgttagaaggaatatcacaagtctctcatgccaacaaaagatgaaaagatggaaaagggaagtgattttgcaaaggtcaaaggacttctttgtaaagccaaaattaaaagctccaatcccttcaggacaccaagcactgcattcagttcttctgctccctaagcacttgtgtgctgtgtgttcagcgcaattctttatgcagctaggaattcggagtccatttatgatcatgacctatttcattttatcaatgcacacacaccataaaattatttagaccttttgaaaaaggcctgtttcagaaggaagtttaaggacaaaaaaaaaaaaaaaaaaaaaaaggaaacatgcattactagttactaagtctacacataaagtggtctcaggaatgaggaagcaagctcaacacctagttacccatcacatcctgacctgcatgctggtaaagagatgagggaggatttaactctacagacgatataataaaaaagactcttgtgtaaaaggaataggaccatgattctactttgttggttttcagaactaaggccatgattaagagggacggccaggggcattcatattgcgctgctagagagaaattcttagactggcgtaagatggatcagagcaaaagcatttgacaagaatgtttccattaatcaagaaagaaagtcggaggtttgaagatgatcagataccgtcaaagttccgaccaacgatgctgactggcgattcagcagagttattcccatgacctgctgggcagcttccgggaaaccaaagtctttgggttccaggggaagtagggttgcaaagctgaaacttaaaggaattgatggaagggcaccacaaggagtggagcctgtggcttaatttgactcaacacaggaaacctcacccagcctggacacagacaggattgacagattgatagctctttctcaattgcgtggatggtggtccatggccattcttagttgttggagcgatttgtctggttaatttcaataatgcaaattatagcaccataggcattaaaagaaacactctactgttgaggaattctatctgaacaattagaccacctctaggccatgtgaccttggtcctattggttaacttcattgtaactcaagtgttctcaaatgtgggggtgattatagagaaggctgtgcaaggctattgtgaagattaaatgaattgctgcacataaaaacagcgaaaactatctagaccaaagaactatctagaaagcccaggttgattttaataatcaggatgagttggaattctaagaaagaaagccagacaaaaatatttagagagggcaaaaagagaaaaatagggacatatataaagtaaatcttactttaacctctgagaaaaaaattaatgaatataattatatatacatatacagatatatatgcatatatacatatatacacatatatatgtatgtatagatatggtgatattttctgagcatggtggtgcatgtctctaatatcagctgatgaaaaggagga

SEQ ID NO: 35919 - DNA, 1129 bp, Mus musculus
aagctggggtatcgggcctctgctaaaaaggctcagttatgccagatagaagtgacctacctaggatatgtcttgagagatggacaacggtggctcacagaagccagaaaacaagctgttatgcagatcccaaccccaaccactgctcgccaggtaagagagttcctggggaccgccgggttttgcagactctggattcccggatttgccacactggcagctcccttgtatccactaaccaaagagaaaggggaattcacctggaccagagaacatcagctagcctttgaaactctcaaaaaggcactgctgcaggctccggcattggccctgccagatttaaacaaacctttcaccctatacattgatgaaagaaatggagtggcaaggggagtccttacccaggttttgggaccatggaagcgcccagtagcctacttatcaaagaaactggacgctgtggccagtggatggccctcctgcctgcgagcgatagcagccacggctgtgctagtaaaagatgctgacaaactgactatgggccaaaatgttactatagtggccccacactctcttgagagcatcatcaggcaaccaccggaccgctggatgaccaacgcccgaatgacgcactaccagagcctattgctgacaaagcgagtaagttttgcacccccagccattctcaaccccgcctccttactacctgaggctgacgaggcccctgcacataagtgtgaagaaatactggcagaagagactggaatccggccagacctcacagaccaaccttggccaggggcgatgacttggttcacggacggaaacagctttgtggtagaaggtaagcggaaggctggggcggcagtagtggatggaaaggctgtcatatgggccagcagtctgccggagggtacatcagctcaaaaagcagaactaatcgcattaattcaagccttaaggctgacagaaggaagggctcttaatgtctataccgacagccggtacgcttttgccacggctcatgttcacggagcaatataccgacaccgtggactgctgacgtctgccggcaaagatatcaaaaataaagaagaaattctcagcttattagaagctgttcatttgc

SEQ ID NO: 35920 - DNA, 1136 bp, Mus musculus
ctgatgatggtgtgtggtcatgatttctgttagtaggattcttacatttgcctttcgccatctggtaatctctgaagctagttgttatagttgtctctggttagagcttgttcctcaggtgattatgttagcctctatcagcatacctgggagactagatctctccttagcttcagtggtcagagtattctctgcaggcaagctctcttcttgcatggaaggtgcccagatatctgatgttcaaacctgcctcttggcagaggttgtgttcaactcaccagaggtcttaacatcccgtggagggtcctgtgaggacattggcggtgtccgagaactccgcgcacaaggaatcccagtgctggagtgtaccagaagggacttgtgcccctgatcaggtcgggttatctgtttccctagttaatggtctcaggtcccgagcgattggattggaacaggcgctgtgttccactcaccagacgtcttaggatcccgtgggtgatcctgtgtgggtccttgcgggtgtccggagactctgcgggcaagacaaccctgtgctgcagtggactgcaagggacttgtgcccctgttcaggctgggttaactgcttccctagttaatgcagtctcaggtccctcgcgattggattggagcagatgctgtgttccactcaccagaggtcttagaatcctgtgggggactgtgtgggtccttgcgggtgtctggagactctgcaggcaaggcaccccagtgctggagtggaccagaaggctattcttactctttttaaaattgatattaacatagttcccacatttttctggatttttgagttagaaacttttgagatgtggcagtttctttgatcaatgtatcagtttcttctattgtaacttctaaacctgagattctgtcttccatctcttgtattctattggtaatactagtgtcagtagttcctgttctttttcctgggttttcatctccaggattgtctcagtttgtattttttttttattgcttctatttccacttttaggtctacaacctttatttttcccacatttttcaaatgtttgattgtttcccccctgtgtttctttatatgttttcatttcctccttaaaggcccttacata

SEQ ID NO: 35921 - DNA, 1139 bp, Mus musculus
tttggtctgtaaggactggaggactgtggtcggcagaagtgctaggaggaccacaggctgtggccctgggggacaccctgggaagtggggagagccaggggcatttggtagtctccggagatcagtcagagggaccaagttctgttaaaatggaagcttcccccttggagatcgtcaaattgttttgcctgcttgtggaggatgagaaagggttgcgtgtgtctggatcttttggtttcggtttggtgtgtttttgtgtatgtgtttagagctatgtgaaaatctagagaaacgaaggtaattctcacaggtgctttataccctgactagagagagtttatacctgagacatgagagaatgggttttgagaaaagcagtactctctgactatctggggataatttggtaaaagaaaaaaataaataaacagtatcaattggcctttggagccctgcaccggtatttaggagtctagtgtggctggagaagccatgctaggacctgattgtaaatactgttcttatagggaccaatagcttctcaagttctatggtaagttaactgatggttgtttttcctacaaaaatctctgttcttgtgattattggattcatcaggtgacaaggtgctcctcttttgaaattacagctagaaaaattaagaattttgtttggtttaaacaaacaaatgtatatagccatttcatttttgtttctgaatagtttcaaaggtataaatatgttttacatgtcttggttatagattactggttcataagtatgattatgattaaaaatttgtaccattggtaacagaaagttggcttaaaacttctaactctgggttagagtaattcagaacctgtggcatgagccaacccatggaaacaggtctctaaagatacgtctgggccagagcatcagcagcagacatcttggttctgggaacctgttgagagtattctgccaggtgagtgtgcggaatacagaagctaatagcttctgggacaggtgggagccacagagcttctaaggcagcccccttttcaggtcccagatatccggccacttttctggccagaggataggagttccgcccagccagggagcgctttgcctgagcatctgcggcagacatt

SEQ ID NO: 35922 - DNA, 1163 bp, Mus musculus
gatgtaagctctcatgctccagtgccatgcctacctgctgccacaatccctgttacgatggatagtcatggactccaaccagccctctgaaactataagtactagtgggttcttctgtaagttgctatggtcatggtgtttcttcaaggcaatagaaaaataaacaagacaattggatcagttcagagaattataaacaccttcaggttttatatattaatgtctataacttaagtttgctttagtagacagtataggtaccagaagtgtgatataggactgtggaattgtaaatggtcctgaagcctgttttttaatgttctcatgtatatgtagatgtgtttgtgcacttatgtttctggttgcatgtgtatatgtatgaaggaggtggatgtcagaaattgatatgggatgtcttcctttagttggtaattatctatccatgttatttttttcagatagggtttctttctcattcaagttgaagctcactaatttggctagactgacaagccccaaggatcctcctcagtgttggaatcatagatacagactgtagcactcacatttttacatgggttcccagggattaaattcaggtcctcgatgtactgattgagctatctccttgaacaccacttttttttttttcgagacagggtttctctgtgtagccctggctgtcctggaactaactctgtagaccaggctggcctcgaactcagaatccacctgcctctgcctcccaagttctgggattaaaggcgtgcgccaccactgctcggctttgaacactaatcagaggctctatgttttttattgttatggtcacatggtgaatctaccttgtgagggcgtttactgggaaccataactgagaaactggttacttagagcatccaagctgctgtgtccattccaaatgtttggaaacaagaggatactatgaaaaagcccacctacttgaccagttgctggaccatggaattctgtaatttttttgagcatcattttatgcatttgcaaaaatcaaaaggaggggctaatgatgtagctcagttgcctagcaatcagggcttagcaaaagaggccagccctgagttcagtccccatttgtagatgtcatttcagcgttgagagaaggtagagagaaaggttagtaa

SEQ ID NO: 35923 - DNA, 1970 bp, Mus musculus
ccattttattctgagacaaagacttcaccaggttgactaagctagccttgagtaggtgatcctcttgaatagctgagatgatgggcctgtgccacctcacctggtctgtgtctgaaatctctaattgtaaactctgggtaggtaccttggattctttccattcctttcttgaagtttagatcctaaatactgagtttgaattcaggaggtcaaagtcttccaaattaaaggatccacagaagaagtgcttccacaggtggtgttggtcacagcagtcagttcctttcaaaaataaaaacatagctattagtgtttcctgaacattggccgttgattcaaggtatttttattagttatttgatatatcatatcaaatagttatgtggatgtgttagcgatgtcatttgtaagagaggacaaggaaggggaaaaactcaacgtgtgtttcctggagtctctttgcatctgtcctcatgcacaatttttatcttttgattttaatcttattattgtttggattcactcattcactctctctgcctcccttcttctccctcctcctccctctttctttctgttctttgagccagaatcccactacatagtccctggctggctctgtagaccaggcttgtccgccattgtctcctaaatgctgggatgaaaaattccatacttggtttaattaatttatattttgtgtgtggtatatgcatgtgttcatatgtgtgcatttgggcatgcagatgtatacattattttgtgcacacacatatatgccagaggttgatttttagctgtcttccttgtagttcgtccttccattttaggagacaggagctcttactgaacttggacctctcaccattgctgggattccagatatacactgtactgggaaagagggaagggtgacagagggcgagacctgaggggaaaatcttgctgagtctctgtctccaaaggccagttccttcctttatactaaaaatagccatggaaaaagaaaaaaagtttatctttcaaacattaagaaggataaatgtttgcaaaatgattttaatcttgcttcctcgttggaggtggttttaaaacgtatttagtagtgaaagattaacagtttattgaatgtagtatacctgtgagttttttaaaggggaaaaagggtgaatctgaggtgtcaggaaacctgaggtagggatcaactgtcttggctcactcagctgagaaactgtgatgttcagtgctgagcgatcactgtaggtcacagaggtgggaaatcttgatcaggaagttggggctcaaaggggggaaccccagaatttacttgagatatctttatgcccacaggaaatgacttgaactatgtatgggtccattgtaaaagctattttgaatcgtctccctcaatggcttatttttgagcatgacctccctctgaggaactctttttcacctatagaagagagtcagtcacctcagggctatccgaggatcctaatgggaataggcacggggcctcacacttaccatcccttttgaagagagctgatttcagattctctgcaagatcagtaggtggtgttaagcactgagccttttctctagtcctgcctgcaactctttagtctcttttctcagcctctggagtgctggggttacaaacatgttgtacacagctggcaggcacaccagtgatttgggggcagggtatgttaggaaataaatgaccatagttgctgataggtacaataagagtttcagatgcttatagaaaaaagggaaaaaggatatagggtacttgaagaatggttcaggcctgtgggcatgggggaagaggggcagagaaactctgcctcccaagcagccagagcccaggaatacacgaaactttctgtttcttgctgtgtgttacagatcactagatttggctttcggtcacgttcttatttgtggtgttgattaggaga

SEQ ID NO: 35924 - DNA, 1195 bp, Mus musculus
tttaaattatagtacattttttcaaggaaagcatagtagaaagaaattggaagcttctgttcacataacatccatagtcaagagcatagaatactgatttagattcttgatagcagcacttgtaccttcaatactttttatgcactctagagtagttggtatatggtaattactggttggttgctaatgtcatcagttgcaacataagtgaaagttgcactcttgggaaggtactgtttctcaaccatctagcccttttttttttttttttttttttttttggtttttcgagacgcggtttctctgtgtagccctggctgtcctggaactcactctgtagaccaggctggcctcaaactcagaaatccgcctgcctctgtctcccgagtgctgggattaaaggcgttcgccaccacacccggcaagcatctagctcttacatgtcactgttattctcctttctctcttttcctttcctcccttaccttttatgtggaaggacaccgtttagctgagtccctgcaggagaatagggtctgctccctccctcccttattccctcttctcttcctctctcccttccttccccctccccctccccctcttcctcccagagtctcctgtatctaaggctggcctcaaactgctgtgtagtcaaggataatcttgaccttccattcgtcctgcctctaccttccaagtgctgggattatagatgtgcatcttcatgtccaattttatggagtgttgggggcatgtgcaaggcaagcactctagcaactgagccatttcttcagcccctctgttctttgtaccatgttaactacccatctgctaggctgttaggacaagcagacaggatggtgagacagaaatagaaacatcaagtaaattaggttgtggagagaggggtggggcctaggtgtttggcttcactaagaaaatgagaaatctgggtagtattttccaagcataggcctatctttttcaaatgtcattatgtcactagtttagcttatttccaactgtgttttctgtcaaagacaattgacatgagggcctggagatatggttcagtggttaagagcacttgctgcccttgtagagaacccccgattcaatttatagcacccatattgagtagctcagaactacctgtaacttcagttctagaggatctggcattctcttttgg

SEQ ID NO: 35925 - DNA, 1154 bp, Mus musculus
tgctcattgcaaactttgcaaatgactttacctgctttgtaacctaggtcagacctaatctcaggatttctctgcttcagtttcctgagttttgagatgacagacatgtgtcatcatgtctggctatccagaaattcctaatgcctggtagagaaagaattttcttttctttccttttctttccttttctttcctttcctttcctttcctttcctttcctttcctttcctttcctttcctttcctttcctttcctttcctttccttttttatctatctatctatctatctatctatctatctatctatctatctatctatgtatctatttatttatttgtttatttaggtttttcgagacagggtttctctgtgtagccctggctgtcctggaactcactctgtagaccaggctggcctccaactcagaaatccacctgcctctgcctcctgagtactgggatcaaaggcgtgcgccaccatgcccagccattttttttccttcttgaaaagttcttggaaaatcagccaaatttatttctctgtccctctctctctctcttccctccctccctccttccctcccttcctcccttcctcccttcctccctcccttccttcctccccctctctttctttaagttttgtttttaaaattgcactgttaacaaatgtagcctgggctgtgtttcttgtgcttttctttcattctttttcttttgttttgtcatgttctgttttatttgtttgttgtttgtttatttatactgatctagcttttagatgctgatttgttttctaacaagagtgtggttttaggtgggagggaaggttcggaggctctgagaggagttgggggaaagaaaaccataaatagtatattatggaaaaatctattttcagcaatagaaaaaaaagaaaattgataatcttttttgcttttgtaaatttaaaatttaaatacagctatttatttgtgtggttcttgtttgctcacacatgtgcaccattacacacatctggagatcagatgacaacataccaaaattgattttttttgtccactttccgggctgtgaatatggaactttagatcaacaggcttagtggcaaatgcctttacctactgagccatatcattacaccatcttgtgt

SEQ ID NO: 35926 - DNA, 1316 bp, Mus musculus
ttccaacccagttatgaaacagtttactagctcgctccatgcattttttttgcagttatgagacacctttcactgaaccatttgggactttcctctggaagctcatgtttattgagctcattgtgagcaaagtaggatactgtggggcatggctggtggttgtaaaggatctttgtccttaagtgcattatggacttgagtcatgtatgttagtggttatattgttcttgggttcttcatgtagaagaataattttagttagctttaaaagacttatgacaaaatacatggtgggatggcggagataaccatctcagagggtaaaggtgcctgcttccaagactacctgagttcagtcccaggctcctcgttgtaggagaacaagctcctgcaagttgtcatcagatatctacaggcctgtgagttcagacttggatgcatgcatacacaaagaagtgagtaaatgaatagaatgaatgtaatttaaaaagtaacaaaatgccgggcgtggtggcacacacctttaatcccaggcaatctggaggcagaggcaggtggatttctgagttcgaggccagcctgttctacagggtgagttccaggacagccagggctacacagagaaaccctgtcttgaaaaaccaaaaagaaaaaaaaacaaaaaaagtaacaaaataagaatttacacataccatttatcattttagtccttgccattgtctcatactccacgtcttcttctctgtcagtttctccatctcccgtctgcttcttttctacatgcttcttttgtccctcttctcttccctcctctatttctctttaactccttcctccttcctctttcctctttccttttcccttcttcctaatacctcccatttcctcctactttcctttccccattctccccactcttctctgtgtcttccgttcccccttattgctccctccagtgctgatgattgaactcagggccaaagtaagctctttctctctcatgtgtgtttcttgtcaggtgtgtgttttgtcatagccacatgacaagtagctactgtatcaggggttatgcactttgtaatacgtaacttgacaattgacattgtggaaatagatcaggttttgtttttctggttattcatttgtgggcacttggttttgttctgcctgttggcagttgttaatgctgctgctgtgagccttggtgtctattgatttgaacttgtgcttctgttgacatctgtactagctcagtttgacacaaggtagagtcatctcagaagagggaacttcagttgcctccttaagatgagact

SEQ ID NO: 35927 - DNA, 1163 bp, Mus musculus
ttgagctaggcatgacttcttagccctctgctcctacctgcattgaagctaatgtaggaattacaagatcagcttgcattgaagcatgacttgagatgcttcctatattggtattcagttgactgtgcgtgtgtgtgtgtgtgtgtgtgtgtgcgcgcgcgcgcatttgttcacagctatttgtcttcagaaactaggggcatcacatgttctgatctttctcctctcttccctgcacccagtgagggacatctcttcccccttatgtttttcccaccatatattcctatactacaaattctaaacagggctgtttgtgtcctttaggggtgctctctgtatcaggggaacagcctcggttgtcatggtcagggtgactgtgtaggctactatgtagcccaggctagtcttggacttaagatccttctgttcctgctttctgagttgggattacagttgtgtaccactgcagtctgcccatataaaattatcttatgtcataccttgatttaagagaacgatctatattttcacttagattgcttttggatgacagaggagattgtgttggcagtgagaagattgcctggggagatttctgtaactgagaaatgtcatttatgggctgctcatgaacagtctgagatcatgctaaactctgagcaggtttgtgtgaactgtttctctgtgtgatttttttttaaaagagatacaaccatcaagttgatcagtgactgcctgccacttacatggttcttagtagtaaagctacagaatgttgtgatatagttatggagcacttcagaggggtatattctaagggatgcatccttaaatttgctggtgggcacccatagagtgcttatacaggaagtaacctagttatgcaggtgatgaaagaatatgggtacactatcttgtaggtggtccgttgctgccagacacatctacacgaagtactgattgactagacttaactaaatcacttatttgcccagttagaagatgttgacaatatatactttagcatgtgttggttgacatttttatcttaccttgggtattgtatattaacaggtaattgaagatagaagaaagggctgaaaaaagtcaggagggggatttgcctatatttgcttctgagtaagtgaaatggttaaatg

SEQ ID NO: 35928 - DNA, 1121 bp, Mus musculus
agccaggcatttgattgctctttggcttcccatactatttctcctttggtgttcgcataaaccacagactgaatgtataattgtctgttgttaaggagtaggggcagggatgttggtagaatgattgcatagcattcacaaactcccgagttcattccttagtacctcataaaagtgaatatggtggtacacacttagaattctatcccatcacttgcaggaggcatgaggtcatccttgaccacatggcaagttgtgggacagcataggctacatgaaaacctgcccttaaacaaaacacagacaacttggacatagcttggtggataaagcacttacacaaatgtgaggactagtatttggatctgtagaacccacataaatactgggtaggctctcatagctctcagaaggaagaaatagcatcttaaagcaaacaggtgaactaaagtagcttgtgttttagagctctgggttcaattgagagacaccccatccatgaattagggggagagcaactgaagaagactcgtaatatcagtctctggcctccacattcatcagcgtccatgtgcacatgtatccacccccacagtaaccatacatacacacatgtatgcacattaggcacacaatcaggttttaaaaactaccagtaagcattagaggtaatattagaaccaggccctgccagcctctgcaatttgtttttgaatttagagatcccaggcctggtgttacagcttcatgatggtcaagtaaggagggatagctaagctgcatctgtgtgtccttatcattttctttaacaaacttcacttagagagaaactggaaacttaacttggcatgccactctgggcagcatctgactaggcaattaattgggaaatcacaaggagattttgactgacttgtatgctaaggtggaatttttgaacttcctatttgtaagccccatcccctgctaatcacacactctggaagaggttttggcctctggagagacacaagttgtaggtgtggtcatcggtaatgcatgcatggcctgtgtgttaggattgacattccaaattgtgccaaactagaacagacagaaaggagcacaggcctacagagttc

SEQ ID NO: 35929 - DNA, 3532 bp, Mus musculus
attctaatggagcagcagtgaatgtgtgggattgcagcacccttcctatgatgggctccaaactgtgtgaacttgacttgttcgagtctacttggaaatcacctgtccctggccacaggattattttccccctcccctaatctccatccagaagtttaaaacacaaacaaatacaaagtcatacgcatggttgtatcacaggaatatggtttccacctagaatgctcagctggggaaggatgaagccatcagctacatggtgcatggttggtttccatccagaacaggctctaatgactgaacagggaaggagaaacacaaagctgtgccaaaaaataaagaaaaggttaaaaacaatgaaaaagaaaaaatgctgtgataaaccaaaagggaggaaaaacctgccccttatggtgtttccctcctatcaatttggatactacagttgctttccaaaaagaccagtttgtaccaatgaaaatgtgtgactttgtaatcccaacgctgtattttctagaaccttctttggtggtttttctatctgctaaaattctgtggtctgggggcctcccacctcagatgcaaactgtttttggcttattccttctgtcttcccttgttgttgcccgccccttcctctgatgtccttgctctggtgtggtctcacttgtaatgaaatcctgcatagataatggccacatgcacacagtggatctttgttggacagcactctccttccctcttgccccactcccacctattgcttactctgtccctttctcatagttgcttcacattaggtcccaaaggcactttcagagcatagtaagtgctttatgtaagaaggcagggatggggactttttacagaaaaaaaaaaaagacttacttataagagaaagaacctggagtattttttgaaaaaaatatttttatgttaaaatgactttaaatcctaaaatggccatcagacatagagagttttgtgaaattcatatttaaaagactaagaagacactggcagagtctgaggtgtctaattaccccttcccttcagcttcacgaaaggcagttaggaaagccgtggattgggaaacgtcctatggaagaacaaggcgattgctttggcagctggtggggaagaaggagcccactagttaggcatcaagcagaatgctcaactgtttggtacacatttacttcagcagccaatgggaacacagtgaagaagccaccctgaccaagtgtggctcatggcacttgccagctacatctttctcacaacagtgtagctaccgatgggcacttttatcaagagcatgcttggtgaatcttgcaaaacctaagacccaaaggcctcagtgtccctcagtcttgtgaagacagtgagtctcaagggagaatttcaatcctaaaaaagaattaagacccaggtagaatgtcactgatcatttctgcccactttccaatttgtcttacagaagattaggacaaagctttctaaaaaatgagaaaataataggaaagagaagtttggctattttttaaaaacaaaataaggcatagtgtgcctggtaaagtttgccatcactaaatcaggtggcctttgtttgtttcttgtcataacttgacactgacttgttgtttctttaattagtaatgggggacagaccagaagggggttgcaagagacagtgtgcagggttcagcctgcagctgaggcaagtgttacttagagaaaagtatacatatatgaagccaaaaatcaaccagcaaggaaggtcaagtgctccctacacaacaaacaaatgttagcaccaaaacatgtattggcctcctctttgacatgtaaattatgtgagccctcaaaatctaagtgttgtggtattgagttgagtggtgagtttggattctgtcacctaaacgcttaacaaagaaagcccaagttctgtggaaattttaatcatagcagatgtctctgtgtcaaaggatatgaagtttcctgcccagagactgctttagttttaggatataattgtggaagtcctatcattgttccccaaatacatttctgttcatctctacagacgatcagctgttagatgccagcctattgtaaagttatgactttcatttgacaagttccacattgctatatggtggtaatgggtagatgacacataaggagttcatcagacaatctctgggtgtccaggctacaccccctagatgaatctaagccacataagaattattattttggagtcaatggctgtgagactaggacaaaaaggttcaatctacacaagaagaaacctaaagaccattcacttccctggccttacagctaaacatggacaggaagttagtgctggccacacgaggaccaagcagaagaatgcagcccacacccctgaagttcacccccataagacagctcagtctgcagctgtttggaagcgtccagtatttggacgctatcatttgcctgctgtcatagagcaggtgcatcatctttgtggtcaaggggtggcccatgtattatgctgttacctaacattgtttataactcctaaaacattgtgaggaatggttagtcttgtgaccaaattcaaccttgaaagcagtgtagtcacatagcagcctttccaggtattttttccttgagtttgaagtaaccatataccattcccagcacatccaggatgctgcctgtagaggaccgaagggccagatggaccttacaaagttcaactctctgaccccactcaacaccataggacttgactttttgttctgtctgactaagaaatagaccatggagccaagtgaagtgcactttgtcacatgtaaggatctgctttgttccttgttgcttttccctttttaaacctttgttatatctttccattctgtttcttgtcaaatgcataaatgtttgttctgcaactcactgaagttttgaactctggcttgtgcagtttttattgtctgtgtcagacgtacagccagacatggtcctctttcaacattttccacattctgttaagcaccatcaaaactcccctccccctctgtcctctaccccccactcccattcacccaacacgctcttcgagaagaaaaaaaatcaccttgtgtgttgtagctcatttgtttcaagagagaatcaacagatcatattcagtgtcttgaataaattgctctattttgatattagagaacatagtgactgtgtttttctttttgtttgtttcatcttgcttggaatctgtaacatctgctgacaactgaaggagagaacaatgtagatcacttatttctgtgaagatacctgacaaaacttatatttattttggttcttggtttaagaaggcacagtccattatggtggagaggttatctttcccccatctgtggtcgcaggagtatgaggtaacatttgtgtatccatagatcagttaagttgtacaaacttaaacccacaagccccaaatctaagtcagtcacctaggctacacaccctcccaatg

SEQ ID NO: 35930 - DNA, 1181 bp, Mus musculus
gtgagtattgtcaggctgtcggcctgtgccacgcagccgcaatggatccaagtttgaaacatggcaactctgaaagatattaccaggagactgaagtccatcaaaaatatccagaaaattaccaagtctatgaagatggtggcagctataaagtacacccgggctgagcgggagctgaagcctactcaagcgtatggaacagggacctgaggacaataagaagcacctcattattggtgtgtcctcagatagagggctttgtggtgctattcattcctcagtggctaaacagatgaagaatgaagtggctgccctcacagcagctgggaaaaaagttatgattgtttgagttggtgaaaaaatcaaggtcatactttataggactcattctgatcagtttttggtgtcattcaaagatgtgcgacagaagccccctacttttggagatgcaccagtcattgcccttgagtttttaaattctggatatgaatttgataacgactctatcatttttaatcagttcaagcttgttatctcctacaagacagaagagaaacccatcttctctctcaataccattgcgactgctgagaccatgagcatttatgatgacattgatgctgatgtgctgcagaattaccaggaatacaatctggccaacctcatctactactccctgaaggagtccaccaccagtgagcagagtgccaggatgactgccatggacaacaccagcaagaatgcttctgatatgattgacaaattgacgttgactttcaaccacacccgccaggatgtcatcacaaaggagttggttgaaatcatcatcatcatgctgctctgaattaatgaaaatcaagttgtatcctcagacaagaggtaaagaagaagaatgtgcaggctgattttaactgattgctatctttgtcagaagaaacttggtccactgagttacaaagatagcaggatgtttgttgagaaattgggtgtaagtataatatatccatctttatattttacttggcctttttcccttgcagcttttaatattctttcttctatatatttagtgttatgattattatgtgacaggaggactttcttttctggtccaatctgtttggtgttctttaggcttcttatacatttatatccatctctttctttaggttagggataat

SEQ ID NO: 35931 - DNA, 2157 bp, Mus musculus
gcaatcatttgtgtacattgtttatttagttactgtttgtttatttagttcctttctggtcactttaaacttggaagtcaggaagccacatgccctgcagacccttattcagatatagcacaaatgtgtggctttcctccaatcttccagtttagatgttttcagtaaaatatcccttcctaaagttaagccagaactctgcatacagcatggcacctgggtgcaaagattgcctttttatgataatacaaatgtacccacatccccacaagggaactttaaggatccaccccttaagcccctccctcctctgttgtaaatggcattttcttctcaccatcttaactttgttctcccagccatgtccgtccgtgaaaactcaggttccaggccgggaacttctatgaaagtttgtacagagctgtatttttggtgagctttctcagtgctttccaatatgcaaactaactgggttatgtacctcaaacaaacaaacacatacaggagatagaatgcaggattataatcaagtcctgtcagtagatgtttgctattaagtaggaaataacatgaaattagcataggaaatattgccttaattctaaacacacatggggagatcacacatgcgcacatgcaccctctgtgtgctcctaaagcaccttgcaatctgactccaatcctaaaaatcaaataaaaaacccttaatcaggctgtaaatcaaatgacactatgcgatgtcactacagtgacatcagacatcatataggaatcataattttctattttaagatttttaattctgtgtgtacatgtgactgcagtacacacagccaacaagtgcaccagagaccctacagctggacttataggcagttctatgccgccctgcggatgctgagaaccaacccaacctcgatcctctgcagtccatgtagttaacatgcaagaaggggtggtaaggcaaaagcagccatgaaaaagggtgagggaaatatgtcctgttcttaactctgagtccagggagagttgtgcacccaacaccttctcatgaaacaatggaatagttaataaatttcaaatttctctggtggtagcttgattcgaaccaaagtataaaagataatcactagcaaataaaaatttaaaaacaaatttctgggctggagagatggctcagcggttaagagcagtgactgctcttccggaggtcctgagttcaaatcccagcatcaacctggtggctcacaactatctgtaatgggatccgatgcccttttctgatgtgtctaaagacagctacaatgtacttacatataataaataaataaatcttaaaaagcaaaaaaaaaaaaaaggaaatcccctcttttaaaaaaaaaaaaaacaaatctctatgctcttcaactaagactgactttaatgtttagtacagataaagtactacgtgctgtggattggtgcttgtctcactaaactagctgttacatgttacactgtagaatgtgatttgatggcttaatactgttcacaggaccctctggctgtgcaaatatcccaacattggaccaaaacataccaatcaccactgtgttgctaggtgaaccctagtgaaaatttagcattgtgtgggtcttgatgttgaggtgaaaatcacagaaagggtctcacttctgactgtagatttgaaatatgttgatttcctgggatttgtttgtttgtttttgttattgttttggatgaagctccgtaggaagcatttgatgaacattcaacacctgtcattcttatttgtcagaacactgtaaaccacctgaaacttataatgcaaagtcaaggtttatgtgtgagttggtgcccccattaggttgtgtttgttcccatcagtttagggggaggatctgcttcccaactgttaaatgttactatcaaatctgcctttgagtctcacacccttgcatctggcctcacagttatttgggagagggaggttgctccagttggttatgtaatagacatcatgacatcattatctgtgtgacttagagaaagtgagcaccccagcgctcctggtcctcacatgtcagactaaaaccccttgtcacctccgttcttctcagagtgtggggctcatcacttgacctgctataacacagg

SEQ ID NO: 35932 - DNA, 1178 bp, Mus musculus
ccctccctatatggggtgtagaaggctgatgcaaagaaaaggaagggtgcctattcatgctttgctggatgctggacgatgagagttttgttaaagtttctcttattgtcctatttattttttcagccttgtcagaacactgagttctatatgcacagtgaagttttcaatctgtgtctaaagccttagctattaattgagagattttgactatgaaagctgggccattattggaccccattactagggggaggctaaatcagagaaccagttcctggaggagctttttagctattatttgagcaatttctatttgggtgaggaacacttttactcacctggaaaaggtatttttaaaaattagcaaattattttgttcttccccagatggcttgatcttggtgaagtcgttttttttttttttttttttttttttttttttttttttttttttttttccagagtttgtggggatgttgctctctcattctgaccccatcctgagtaagggctctctgctttgtatttagctaagggcacacctggcatcttgctgagacatctcatgatagactgtccagtcaagggataacatatcttggactgaacaactcagaatgtttgtggaccccggataagtagcctggtgaaggttagttcccaaaagtcctgccaattctttctaggagtatgatcttcccctctaatgtcctccattgtggcagtttgaatatgtgtggccaagggagtggcactattaggtggtgtggccttgttggagtaggtgtggccatgttggaaaaagtgtgtctctgtgggagtgggcaatgatatcctcctcttagcaatctggtagtcagtcttcttctgtttcccttaagaacaagatgtagaactctcagcatctctagtaccatgcctgcctggatgttgtcatgcttcctaccatgatgataatggactgaacctcaggacctataaactagccccaattaaatgtcctttataagagttgccttggtcatggtgtctctttacaacaatgaaaacactaagacatctatcaacctgtgggtttgagctgttgtaatcgtttatatatgcttgggccggaaagcagcactatcagaatgtgtggccttgttggagtaggtgtgtcactgtgggtgtgggcttta

SEQ ID NO: 35933 - DNA, 1245 bp, Mus musculus
ggctactgctgcatcatattcctccttggagaaaagttatgagcttcctgatgggcaggtgatcaccactggcaatgagcagttcaggtgttctatggcatccatgagaccaccttcaactccatcatgaagtgtgatgtggacatccacaaagacctgtatgccaatacagttttgtctggtggtaccaccgggtatccaggcattgctgacaagatacagaaggagatcacagccctagcactcaacacaatgaagattaagatcattgctccccctgagcgcaggtactcagtctggattggtggctccatcctggtttcactgtccaccttccagcagatatggatcagcaagcaggagtacgatgagtcaggcccctctatcgtccactgcaaaagcttctagatggactgagcattttccaggcaactgcatgagctgattctgaagtatcactttttcctggcaaatgtacacaccttatgctagcctcataagactggaataagcctttgaaaagaaatttgtccttgaagcttgtatctgatatcagcactggatcatagaacttgttgctgatttttaaccttgtattcaagctaactgttccctttgtatatgtttaatatcctgtgcatatcttgatttagtccttagttcatgtggcttggtcacttggtggctgggtagagcacactgcggaagagtaattcccagcctagtggatctccgtgagcaccacatagtgatctgtgcagggtattaagtgacagcagatatccaggatttcccgaagctggaaagggttcctgaagcagttaccacttcttttttgccagtctaacagggtgagaaagtctgagccttaggacccagtttactgttctggttatttccctcctgaccaccatgggtttttacttaccctgagttggaaacgtttgcatctacacctgtatatgtattcacccttttaatttatgtaagaatttttgtactcaaatctttaagaagtgacaatttttttttttttttactgttcactgagaatgttaggccctagcaacacatcattgtgtaaagaaaaataaaagtgctatggttacaaaacatgcaaagtgtttctttaaagaatagtggaaactatgaccaaacatacaatgcctattagtcatattacataagtgaaaacctttaagcttataaagactagactcacaatcattcttaaactaccataca

SEQ ID NO: 35934 - DNA, 1210 bp, Mus musculus
gatgaatgtggccgagagccctgaactggatcctcactccccagaggatgaagagcagccggcactctcagatgatgacattctgagagaaagtggatctgaacaagatttggatggagctggggaaagggcttctgatttggaggaggaggaaaatgcaaccagggtacaaagccaggaggaaacttgctcggatgagaaagaccgagccagtgagcccaagtcccaagatcaggattcagaggctcatgagctgagcaggggcccagagggatccccatgcgaggagggggatgatgttgaagaagatgggacaagtgacctcagggacgaagcctcctcagtgacccgggaactggatgagcataaactagactatgatgagggggtccttgaggagccagctcctgctgcccaggaggaggaggctgagaaggctggggctgaggagaaggaggagaagggggaaggggctcccggagaggaagggaagcctgatgtccaaagtgtgggagaacaagaacccacagaagctgccaaggagaagaagaaagaggatgacgacggggagattgatgatggcgagatagacgatgatgacttggaagaaggcgaagtgaaggaccccagtgaccagaacgtgaggcctcgccccacctgccgattcttcatgaaagatgttgtgacaccattatccactcttcttccaccaataccaaattccataccactcagaggccaggttaaaggaaactgcacgtggggaatgagctgtaggtttatccaccctggagtgaatgacaagggcaactactccctcatcaccaaagcggaaccttttccaacaaacggtgccccgcctcttggacctcacccactgatgcctgccaacccttggcgtgggccagtggttgatgaaattttgcctccaccccctccagagcccccaacagagagcgcctgggaacgtggactccgacatgcaaaagaggttttgaaaaaagcaaccattcggaaagaacaggagccggactttgaagaaaaaaagttcacagtaaccattggtgaagatgaccaggagtttgagaaggagaatgaagtcttccgagattggaattctcgagtcccgagagatgtcagagacacaacacttgagccttatgcagacccttattattactatgagatagagcagttttggcgtggtgga

SEQ ID NO: 35935 - DNA, 1279 bp, Mus musculus
aaagacctgaatgacagtaacttcaattctctgaagaaagcaatcaagtaatctgtcagaatatggagagatctcccttgctcaagaattggcagaattaacatagtaaaaacgacgatactagcaaaggcaaccaacaaactcaatgtaatctccaataaaattccaacacatttcttcaaatacaagtaaagagcaattctcaaattcatctggaaaggcaaaaaactcagaataacaaaaacaaaacttaaaaatggaagaaaagctcctctccagctccggctccgtagccatcatgaatgacacagtaaccatccggaccaggaagttcatgaccaaccgtctgcttcagaggaaacagatggtcattgatgtccttcatcctgggaaggcaacagtaccaaagacagaaattcgggaaaagctggccaaaatgtacaaaaccacaccagatgtcatctttgtatttggattcagaacccacttcggtggtggcaagactactggctttggcatgatctatgattctttagattatgcaaagaagaatgagcctaaacacagactcgcaagacatggcctttatgagaagaaaaagacctcccgaaaacagcgaaaggaacgcaagaacagaatgaagaaggtcaggggcactgcgaaggccaatgttggtgttggcaaaaagccaaaggagtagatctgcggtgacttgatgttttgctgtgatgtgcagatttctgagaggacaaataaactaaaaagcttctacaaaaaaaaaatggaagaaaggctggggaaatctctatccctcacatcaacctttactacagagcaatggtgattaaaaaaaaaaaaagagcatggtataggtacaaagaaagacatgttgatcaatggaatagaattgaagacctgcatataaaaccacacacttatagatactttatctttgacaaagatgccagaaatatacaatgggaaataagcatcttcaatatatgttatctattagaagagaaagtggaaaagagccttgaactcattggcacagggggaaatttctaaaacagacctccaatggttcatgctctaaggtcaagaattaataaatgggacctcgtgaaactgaaaagcttctgttaggcaaaggacatagtcaataagagaaatgggcaacctacagattgggggaaaatcttcattaaccacacatctgatatagggctaatatctaaaatatataaagaacactaaaagcaaaccaccaaaaaattga

SEQ ID NO: 35936 - DNA, 1176 bp, Mus musculus
aggagaagaacaaaaagggcacagcacgctgaagaggagagcagaggatgtgttggaggactcccctaaacgtcccaaggagtcaggagaccatgaggaggaaaacaagaagatagctgccatggagggtgagaggcccctgcctgtagagatggagaagaacagcaccccctctgagcaagactctggccagggacctcttgcaaaagaagaagggaggaagaggctgccaaggaagatgctgaagcccagggcatcagggatcatgagagcctgtagccaccaatgtttcaagaggagcccctgccttgttcctgcaaactgggaaccctttcccaccctactcaccctattccctccctcactctctcctctaagcccactgctggagagtgtcttggccctcacctccagttcccttcctatatacaccctgtgccccaggatgacatgaggcctttgtatctccttacatttatttcctagggtttctgctggggtctaggctgctatttccacctcttgacacctctgccttgctgcaggcattctagacctttggggtgggtagtgggcaggagtggaggtgaaagaatataaaggagtgtgggttcatggatgacatcgtctacctgagctcttgtctccagcccccacacctaaattcccatgtgcctacattcaagaaacgggacactgtgtgggagagaggctaccatccatccacaaatccttgttgatttttgggaacacttatccccctgatgccagggttcaaggaattgtagtttaagcatctagactttggagtttccaagtttgggctgagggagctgagagctgaagaatcaactgatttgcattgaggaaatgtctttttagatctcagggcagaaatgataacttggagagacctgctgccttcatctacttcccaatgcttgaggccagcccatagacagatatttcacccagacataaaggaaaaaccatttttttaggaaatgtttttaataaaagaaaattaccaagaaaaaaaaacccaaccaacaaaaggaaaaaaaaaaaacaaatgaaaaaagttaccctgcccctttgtgtgctcccttttctgttcctttctccccactgctgacccatttttgaggtacactaggacagaggctcacctctgat

SEQ ID NO: 35937 - DNA, 1178 bp, Mus musculus
aactagtttccttggacacttgtagtatgctgtagaaatttgtacccttgcaaattgttcttaccttctgtagtggctattcctggttgtcaacttgactatatttggaatgaactacaatccagaattggaaggctcaccagtgacccttatctggaggcttcgagatccttatctggatcttggtttgaagatcttgagccatagtggctatggattccagaagattgaatctccgagtttaaggaacacacctttaatctgggctatgcctttcatctgggattaaaggtgtggaggaacacacctttaatctgggctacaccttctgctggagacaatataaggacattggaagaagggagtctagctcttgttcttgctcctttgcctgcttgctgcgtgagactgagtaactgctagatccttggacttccattcacagctgcgactgaacaattgttgggaattgggctgccgactgtaagtcatcaataaattcctttactatctagagactatccataagttctgtgactctagagaaccctgactaatacaccttcctctgcttaatcttccatgcaacatatattaaatttcccaagattctaaaaataacaataaaattctgatgttggcagtcgtcttctttgacatcataaattctttaaatactatcttcactatatattagaagtttcttctcatctgactagcaaacaacaacaacaacaacaacagcaaccgaagccttgagatttctttccttaatctcagaatgtcttggaaacaaaactatttagagtttctcattctagtaatacatgttttctttcctctgctttatttttttccatttctaatttctcttttgttcactatttatcatttagaagtcagttttatccaaggaccctcctacttttgccctcctggatgttcttatgcaagtctgtacttcttcataacttttatgtgttcttattaaataattatagcataatttgccactctttatagcaataaaatttcattaatggtaggaaattgttaatccagctgatttattgaattctgcatatctatcatagcactttgcatgaggaaaatgttccagaagcttgtccagaatcagcaaacatgtgaaatctgctcgtgtatttcaaatgagactt

SEQ ID NO: 35938 - DNA, 1194 bp, Mus musculus
tccaaggaagcatcatcagcatcaccaccagcagcaccatcagcagcagcagcaacagccacccccaccaatacctgcaaatggccagtaggccagcagccagaatgaaggcttgactattgaccttaagaattttaggaaaccaggagagaagacctttacacagcgtagccgtctctttgtggacaatcttccccttgatatcactgaggaggatatgaggaaactatttgagaaatatggaaaagcaggcgaagttttcattcataaggataaaggctttggttttattcgcttggaaacacgaaccctagcggaaattgccaaagtggagctggacaacatgcccctccgtgggaagcagctgcgagtgcgctttgcctgtcacagtgcatcccttacagtccgcaaccttcctcagtacgtgtcgaatgaactgctggaagaagccttttctgtgttcggccaggtggagagggctgtagtcattgtggatgacctaggaaggccctcagggaaaggcattgttgagttctcagggaagccagctgctccgaaagctctggacagatgcagtgaaggctccttcttgctgaccacgtttcctcggcctgtgactgtggagcctatggaccagttagatgatgaagagggacttccagagaaactggttataaaaaaccagcaattccacaaggtgagagaacagccacccagatttgcacaacctgggtcctttgagtatgagtatgccatgcgctggaaggcactcattgagatggagaagcaacagcaggatcaagtggatcggaacatcaaggaggctcgtgagaagctggagatggagatggaggcagcacgccatgagcaccaggttatgctaatgaggcaggatttgatgaggcgtcaagaagagcttcggagaatggaggagctgcataaccaagaggttcagaagcgaaagcagttagaactcaggcaggaagaggaacgcaggcactgtgaggaagagatgcggcgacagcaagaggaaatgatgcgccgacagcaggaaggattcaagggaaccttccctgatgagagagaacaagagatactgatgggacaaatggctatgggaggtgctatgggcataaacaatagaggtgccatgccccctgctcctgtgccacctggtactccagctcctccagg

SEQ ID NO: 35939 - DNA, 1793 bp, Mus musculus
gttcaattggggttatggcctggcctggggtgcaactatattttcatttgggggtgccattctttattgcctgaaccctaagaactatgaagactactactaaaatcaagtctgaaaaacaaacacacatatgcacacacacacacaaaacatacactacacacaccacattacacacaaacacacacacacacacacacacacacacaccacatgaaaaagagaaactaaccatccaacaaaagatttgtgttgacatcttttctaacactattttctaaaacacttgtggagcctcaagcagtttgctcagttgatttaatatccttgcctttgggtgtcaacatcataaccagcttttatatccattttagggacctgcacaaattaagaatgctgattagatataggcatatgctgcaaacttccaatatgcttatgccatttctcttgacatgtgaaggatctgtatgacagcaaccattttgagaagctagttggaatgagaattgccagagtctctttttgcctgcagggaaacagctgcataagcaacatgtaaaagttccattgctctgacatttctactgttggagcccttatcacctgtttatattgcgcagtggctatattggttattggttactttgctttggaatttgaaactgccatttgggcatctaatgagaatcatagatatagccatttaattctacctttaaggctgttctttttaatagcaaattatactttaccaattatcatctcttgggaaggaagtcaacgtttggagacatgtgtttttcattatgtagttataaaattgagggtgtctgctttcccctggggcaatcagaaagaaatgtgcatgagttgcttttgtacccttaaaatcctttaaaaattttgcagcaaacaattgtccatatgtaacaagcttattcttctacaccacaagccattaccatactggtaataagttgctcattaatagtccacatacatgtacctatcattcatataatcaatacttgctctagtgaagcaatttgaacactaaccttgtatgcatcaacagactcagtattcacagttacttaccatacaaaagttcatataccttaaagcttttgctctgtgttctctactgattcattggaaagtattaatagaattgcctaagaagtaaaattgaaatgttgttaatctgaaatttaatgattcttttataagtattgtagttcaaaagagagtaggaattagaatgatcactttgtgtaaaattcattaaaatacaaggctgctatttttgcaagtattttaaatgtcttcattttaaaataaaggaatagtgatagatttctataaatgtctaaaagtctcagtagatgagtagtattccgttgttacctggtcctctgaagttaaatgatgggctaactgatttgtgcacacaagtgtgatgaatttatgttagggaaattattcactgactattccaagggaagaaaacatcaacaataaggaataagtttgcaattgatctttactgcaaacttgtgttaattctgtttattatacaaatctggatagtttaagtataagcctatttttatataaaatatacaattctgataggaaagttataaatgattatttttgttaacaaagacattaaagcaagttttctctcatttgaccctcttgaagacagaaacattggggaagaaaacattaaaaatgtatctatttactaatatattatacaattcactaagaaaaagactgtgtca

SEQ ID NO: 35940 - DNA, 1432 bp, Mus musculus
cagatatttgtaatctactgaaaaatagattctttctgtaattttctcccttcccaattaacgagccctaagctacatttttaccatatttggaactttttcattactaagaaagcttagtacagtggggaaatcctttttttcttgtcctaagtaatgtgtctatctgaataaacacaagtgataatttcagctatagtagcatcatttcttctagctttaggttggattggtgttttcttaaacagagttgttagtcatgaacccatccatggttaccttagagagatgatatacacacagagaaaccctaacattattcagcagggctagctattcagatttcttgcacaagtatttagctttttgtaaggtcaacatgtaaattttaaagacaaatatagagagacttatgtgtttgaaatataaatgatatatatggataagcatgtacctgtatattattaaacatgcagtgaactgactggtaagtgattgtctaattgtatggctagcaatgtaatttattcagactgtatttttgtacagagcagcgcacactaacctatgcctctgtgtcctccttaatgcctaaaactgtgcctagaaatttcatctgtcttaaagaaaataaaatatattccatgctgttttatgataatagtttctttcctgctattctgtatttattatttttaaatatctgacatgtttactacttaaatatgagtttatgttatcctgttcttttcttttcttttctcttcttttcttttcttttcacttagaagtcatctggggaaatctgtttgtcactccagtgatgcttgagtgtgcagtcccattatctgttcttcatttaatgatttttgtagttgacctaacgttatctatgtggaaaaaaaattaaaaaaaaaagtggtttcactaacaatgctcttactttgtgtcttcttttttgtgtaaacctactagagaaaaatttctagattgcatatcatcagttcattttctatattaaaatatatttaaaaactgcatagtgcaaaatgtgtatagttttattttcaaatcattagtatttattgcataaagcaaaggatttcatagtgacatctttgttcaactacagcactttgactctattgtcatgctttttttttcttagttcttccttcctcttcccaaatcaccatttttttcttttaattttatagtgtgtgtgtgttgtgtgtgtgtgtgtgtttatttttgctatgctatccattgatcctacataaggtaggcaagcactctactaccaacttacaccctctgtcccaaaaaaatacagtttaaatttttcttacttggggtgggaacatcctcttggagacatggtaggaggaatgggatgaggaactgtcagagggcagaccaggacaaggataac

SEQ ID NO: 35941 - DNA, 1178 bp, Mus musculus
agagcggacgctgacggatacagtaatagacagtggagacggagtcactcatgtcattcctgtggctgaaggatatgttatcagcagctgtattaaacacattccaatcgcaggaagagatataacatattttattcagcaactgctgcgagactgagaagtaggaattcctcctgagcagtccttggaaactgcgaaagcagtgaaggaacgctacagttatgtctgcccagatttagtaaaagagtttaacaagtatgacaccaatgggtcaaagtggatcgaacagtacaccggagtcaacgccatctcaaagaaagagttttctattgatgttggctatgagcgattcctgggacccgagatctttttccatccagagtttgctaatccagattttacaacaacctatctcagaagatgtagatgaagtcattcagaattgccccattgatgtctggtgtcctctctacaagaacattgtcctctctggtggttcaactatgttcagggactttggacatcgtttgcaaagagatttgaagagaactgtagatgccaggctgaagttaagcgaggagctgagtggtggtagattgaagcccaagcctattgatgtacaagttattacacaccatatgcagtggtatgcagtctggtttggagggtcaatgctggcttccacgcctgagttctaccaagtatgccacaccaaaaaggattatgaagaaattggacctagcatttgtcgtcacaatccagtgtttggagtcatgtcctaaagttgacttcttgtttattggggtcagggagatggaaatgagataatctttctgatgacctgtttttgtctgaatggatggttctgaggtttttaaccaaacatgatcatacaggaatatttaatgagtgtgtcaacatgcagatgtagaagagagccaagacgattgttttcctttaggttgaatatttgaatcttatgtgtatcaaaaaagaaatgggttttagttctttctgtgccctgatattttgtatattattgacttacccagtgtgctgggctcagtgggtgtgtagagagctctgtaatgcctgattgggcactgctgagtgggtagtgcctgagcttgtttatatttcatacttttttatactttgagggaaaaaagtcaaagaaa

SEQ ID NO: 35942 - DNA, 1126 bp, Mus musculus
cctgactaatgaatggaagggtccagatccagttctaatttggggtaggggctcagtttgtgttttttcacgagatgaagatggagcgcggtggctgccagagagattaattcgtcagatgaacacagattctgactcttctggtaagtatcattctaaagactaaaattccttttgtgcttaaaattcagctgagagcaacagctctcaaagctgttctccagctactctctgaaccagctcccgacaggaggccggagacgagcctcagctttacaatttgcatttgaataaagtacctagacttccccgaaagaagttctgctttcctactttctcactgtctttcaagattttgtctttcaagcaggtaaatcaacattctcgaggcagaccagtggatgtgcatccccgcccccctagagcacacaggtggcagctgttacccccagtctcaggacatttccagcacgtggttttcagtctgagttaaaaatttaggtttacctagagggctagaagagtagatatttccatattaataaagattggtttttattttgatagataggcttagccccttagctgacctctggcttttcacccttgctgttactgcaaggtgtccttagctcaataggctgtgaaaaaaacagggatgaggaggaacgacttccagctcctattttagccacaaatcgtggtgttactaatgacataattcttgcttaggctttgctaattctgaggttgataattctcctttaggagctgcacagcactcagaactgtgcatactggtttgtgattgtacaaattcagtatgggcaccgcttggtgcagagatacttactgcaagggaaggtccggcttgaccatttctgagtttcctgtgagataaacccggtttgaaagaggttggtaccaacttttggttaaaaataaaaaatattctccggctctacctcgcctccccaaaaggtaccgagagccacatgtgtgggttttacccacgggaggaattgggtccatgtccacccaagccaaggttaaaagcccactcatctacggatgagaaaatcatttgatcacctcagttaagcgttgccttatttaacttaattaa

SEQ ID NO: 35943 - DNA, 1160 bp, Mus musculus
tatccttgcatgatgccttataagtgtggaaggaatctgtgctgcagaagatgtagtagttgtgattcttttattttgagtttctttttccctttaccatactgatgagacccatccatgggttgactttagcaggggttctgccaactctggatttgagcctggtttcatcagcatttgattgaaaggcttaaagtgacaggctcctgttatatcacaaacaaattggatattttatgccttcagagggtctctggataaagcaaggtagctgatgcatggcctcattcccttatccaaatattggcctgtagcctctgtgaaattatgtgactaaaaaacaaatactaaaattttcctcccaaaaaactgggaaatggttttaattgtcacaggaaagcatttcttactctatgctctatttctttttcttccactcattttctgtctctcactctctatgtcataatgagatttgttggagtttacctacattagtcattgctgctagagcagaacaatatggtggtaagcaaatgtttggttacaatctttccaccaaaaagaaaaaaaaattctggaagacagactgtgttaagaagaggaaggataattgaaagcagaactccaaaatgcaacttccaggatgcttacatccatcactaggtgtaaatctatagtttcctagatgaacacacctggtttggggtcaccagtgtccctatatgtaagtcctcatttgtactctgtaatctagcccaataaagcctcatcgttatgttaaggattggcttccatgtgtatctggggttaatgcactttcacttgcttttcccaggaagagtcaatccaacagtgtttcaaggtgctggtatgtgacagtttactgctaaacttgtatttaattgtctcagaaaattagtcactaactgttaaaaattacaagtaaagcatgcataaataaaactgccagaaataaaaaggacaatagaataaaacttgtacataaaatatgccacctacagggtgtattttgtgaaggaaaaataattttgtctcaaagtaaagcaactggtccttccagaaggaggaaggaatatgtggtactaatctcagtagacttatgttcatagagaaggaatctttttttattttttgag

SEQ ID NO: 35944 - DNA, 1098 bp, Mus musculus
ttgattggcttgcccaccacacaccacagagctctgcctgtctcccaagatgcctgcttgaaccaggggtagaggatgctttttctttcttttttttttaatgttaatttttattagatattttcttcatttacattttaaatgctatccattttcctagtttcctttctgaaagtcccctataccttccccctaccctgctccccaacccacccactcccacttcctggacctggcattatcctatactggggcatataatcttcacaagaccaagggcctctcctcccattgatggccaaccaggtcattctctgctacataggcaactagagacaaactctgtggggtactggttagttcatattgttgttcctcctacagctctgctgcctcctaggagtctctaactggggacacgcatttccatctgcctcctacatcaatcataacagctaacacaaaagacagccagattgcaaaaggcagtcacaagaacataacaggagccaaggaaatatggcaccatcagaaccctgctctctcattacagtaagctctggatatcacaacacacctgtagagcaagattctgacattaaatcccagcttatgaagatgatagcagcctttaatgaagatataaataacttccttaaagatatacaggaaaacacagacaactgaatagaaccctttaaggaggaaaagaaaatatgcttcaagaaatatcagaaaatatgatcaaacatgaatgaaataaataaaacagtccaagacctaaaaatcgaaatagaaacaataaagtaatcataagtggagttaaacctgaagatggaaaacctaggaaaaggaaaaggaacttcagacaaatcatcaccaacagaatataagagatggaagagagaatatcagatgtagaagaaatgccaagtgtaaaaatttcctaacaaaacatccaggaaatttgggacacattgaaaagaccaaatctaagaataataggaatacaagaggatgcagatttgcaattcaaagggtcagagaatatcttcatcaaaatcagaagaaaacttccctaacctaaagaaagagatg

SEQ ID NO: 35945 - DNA, 1154 bp, Mus musculus
gctctgagccccatttttaatggggttacttgattttctggagtccaccttcttgagttctttatatatattggatattagtcctctatctgatttaggataggtaaagatcctttcccaatctgttggtggcctttttgtcttattgatggtgccttttgccttgcagaagctttgcaattttatgaggtcccatttttagatttttgatattacagtacaagccattgctgttctattcaggaatttttcctctgtgcccatatcttcgaggtctttctccactttctcctcaactgccactgtgcttccctgggatcctgctgcctgctgagacacctttgagacaatccaagttgagcagcttctttgggctgagtccaggtcctgcatggactggcaggaggatgggcctaccccctatataagcttagactctaagtaaactttaaggtgccttgaacagagtacttttgtcttgacgtctttatttctcttcctgtctattctctttcagccccagcctgcctttcaggagtacccggttcatgtaggccgcgggcggcttttaactacacagaagagtggagcaaagcaaaactgtgattgagattcattgtatgagagaaggatctatttacaatgataagaaaaaaaacaaaaactgccctgaaatttcctatttcttctggagaaaataatctttcttgattgaaaaccaaatttttattgaacacagcaaatgaaaggatttctaactgttcatgctctatgttttcatctgatttattgtgaatatcctccattcctttctcttgtttacagtgtctgtagtgtcatttattcaaatagtctttttaatgtaatttattaatattggtattatgatcattaaattgattttaatttgctagaactttaaccacagaagaatattttcaatttttgagtaagttttcaacatttgatacacattatgggctagtggttttgggtttccatagaataaagatgtacataaaactgaaagtaactctgacatatctctgaaacaatttgcaatatttattttgtttcaaacgaaaatagcatatctctatgcaatccagaacttctgttgtgaccatgtgggagatggacatagttcctgaagt

SEQ ID NO: 35946 - DNA, 1148 bp, Mus musculus
caaaagtgttcctatcattaagagtctatgctgtatattaataaaataagaaactgcctacattaattccatagaagagtgatcagtgctcttagggaccactgccagaaagatattgtgcctggcatgacaataattctttcataaaagtagaatagttcccatttcagatcagaacaagacacatctatttacagaacctggtttccttataggactctgacaactacccattctcccttaagtagctcaactgaaaaatattttggtatagtgaatgaccatactttgtaaaaaaaaaaaagagagagagagagagagtaaaaatatatttccccaaagaaataaagaaagagcatatggttagcaaggtcaaactagtttaaaagtagaagagtggatttttcatctgtccatgttttacttgtgtgtgccatacattaccaatataagtctatgtactgtgaaagagcatttctggaaagaagctgtgtctgcaaagactgattaactgattagaactgcagtgatgtgaagagggtgcaaggcagcaggttaagagcctaattatctcatggtgtgctacttttagccacttaaatatccgtcccttgctcacctctgtgtcagaactaacatcctgtgactaatagataaaaactttttagaatcttttaacttagcagaccactagcttccaacaactccaaagctaaacccatcaagatagcatctgaggcctatagaggagagcctaccttattttgttataacctgcttaccagatgtacctatcaatgtattttaatactgccttgatttatgactttctttgttctgctactataatactttttgaaacagcttccatgtgggaacatggaacctgagaaaacctatgcatctctgtgtttcctggcccatggtcactcaaatttgactacataataaagatgtctcattccctttgaaaagagatctgtggtttttgcatcaacagcatcctagtctaaattacatggacattttacatttgagagtaattatcttaaaccagaatcatgttgcagttgttacacttggccaaggaaaggtagtttttaatgtgggtttgtcattttaatagagtatggagtagatagaggact

SEQ ID NO: 35947 - DNA, 1146 bp, Mus musculus
accacagctatgccagtgattttagctctatttaaattagactgatctggaggaatactgtgatctgcccttattagctgtgaagccagggtgtccctatccctcctttgaccataatctgcatagtaattggatgtctctccagtcactatccagcttttttgtttttctgtgtgtatgacagagcaaatgtggtaccaccagtccaccccatgccctacccctaccccacatatacatacacacatccagccctccctataagtcttatagtaagagctaaggtttgtacttttttcctactgtctatttgatcaatatactaccattcttgttcattctgccttttcctgccccattgattctttctgtcctttcttttcttcttcttctcttcctcttcctcttcctcttcctcctcctcctgctcctcctcctcctccttgtcctcaatgcctaagcacttggctatgatagctatgtaggctgtttctatttttgataaagtatgtagtatcaataggtagtgctatgatgaacatcttcacataattgttgcttttctttaaaatcaatctctctctctctgctctctctctctctctttctctctctctctctctttcttcctccctccctagctccctccctcctttttgccttccttcaccccctccctccctccctgtgtgggtatgtctgtgtctgtgtatgtgtgtgtggttttcttctaggtataaatgtgggcatgtgtataccacagaggataaccttgcatataagtcctaacttcccatcttgtttcagaaagggtctcttgctctttgctagtatatatgcctgaaaatccggcccaccaactttcaggggttctcctatatctgcctattcttttgtcataggaccagtgagattatagacatacaatgtgttgcctggctttttatagtttctagagttctgagttcaatcaagtctttatacttccatagcaagcacttataccaccaaggctccccagtcccatttattttctctgacattgattcccttggataaattctccaggaatataatgatcagattcaaggctataaatattttttgtggcttttgattcatattaacagatggcttttcttcaac

SEQ ID NO: 35948 - DNA, 1178 bp, Mus musculus
ttaattactttgacgttcttttcataaaacattttgctgaatgtactggcaaacattgacccagagttgagttgagcagaaattgtaatctagatcaaataaaagtgattcattaccccgtacagagcaatggaggtatcattcccaatcgaacatatttgaaaaatcattgtttggaaggacattggtaaactgagatgatgccccatgaagaagaaataaaaggacctgggagcagttctgataaaccttgaaaaggctgcttaaaggtagcatgtatgaagccttgggttctatataggtttccagtcagatggctgatgctggcaatgataacccctgcaaaaatgtttcatgctaaatgccaaacactgacacaaatggctttcactttggtggctcacataatcttgaaacagccccaagaaacaggtaatgttaaaaacttcagtttcataacagaagaaggtgaaggcatacagataaagatattttcccgaggctgcatgggcagtgagtagcaaagctgggctttggattctagggctgagctttcccatcctttgcttgattgctgtgatttcagctcagcatgatgaaacatttggcactagggtccattacacagatgttcaggatgctttctcacctgagtgatacttttctcacctggatgatacttagacagtggctgtatgagtgaatacactggcactggctaagattttggactctgtgattcagctccatgatgccggtcctttgaaaacaatgaaatgacttgcatgatctttttttcatctttccattaagaatctaaatgattccttaaaaaaaatcccagtttgtctgtgatgactctgacataggggaaagggattggcagatctttttgatcagtggattgcatcaataccattttgtaacaaggcaatcccaaggctaaaaagctcattaatttggtgttacatttgtcattaggagttagtaaggactagagtactgctgcagtggggtcaagtgttacaaagtaaatggagccttgatccaattctacttgtcattctgacatgatgtagctagatcctttaatagcaaagtatgtgctgaaaggggcaggatgtgatggcacttcacttagtagctgtattctactaaagatgccatgcaatatattc

SEQ ID NO: 35949 - DNA, 1183 bp, Mus musculus
aagcatgagtcaaccctatgactgtatctcttttttccttgggtcctaaccgaattttccttggcattcccactattttgtagaagatcttaatgtaataacatgatggcagtcccagatacgctggagccggaggggagaggatctatttgggatatgactgagcaaaagagtgacaccacagcttctaacagcccctcaaatcagtattaactcacacacagactacattgttctcactcaaagcctggtgtaggaatgcatacttgagatgattcattgcctagattaaagagagacaaaatgtggaactcagactacaagggcagaaatagggttgaaggtagaaatgtgttactgtggaagatcaagagattaaggtaaacatgggtgtgggggctcacatttgcaagcccaacagttagaaagcagaggcagggtgatcgttgcaagttctaggccagctgggttcatgtagtgaattctaggccagacagggctatagtgagacaacatctcaaaaatgaaggggtggagagaaaatgagaatggatagatagaagtcagaggagtgagattgtgatcaagaaagttgaacaaatggggtattaggaaggatttcaaattcttcctttatttaagcattgacagtgtaggttctcactcaacttggaagcgtggtgcacgtggagatctcggaaaaggttagagtatgtacagttcctgctggagtagagccaggattgagcaattcaatcagcaggatactgagatcattgaagtgataatggagattcacagatgccgaagaaggtagatgagggttctaagaagataaggatacaggaggaaagagagaatagttgaaccaaatccagtgatgttcaaaaatctccaccagagtagagggcacctccaggtcccaagaaggcaaaccttataggaaagccagggttcatttgttctcaaatagaagaagatatgtttttggtggttttctttactacatgtcagagatttagggcaatctccatcagaattgttttgtacataagatctgaatacagctaatggactgttggaagtgaaaatgacatcatagagcacgaaaacatactgcacacctttgagaagtcaatgaattctgaaaacaaatgagctttagtatctctgttatttccta

SEQ ID NO: 35950 - DNA, 2392 bp, Mus musculus
agaggattagacagtaagagtttacaagaaataaaatctatatttttgtgaagggtagtggtactatactgtagatttcagtagtttctaagtctgttattgttttgttaacaatggcaggttttacacgtctatgcaattgtacaaaaaagttaaaagaaaacatgtaaaatcttgatagctaaataacttgccatttctttatatggaacgcattttgggttgtttaaaaatttataacagttataaagaaagattgtaaactaaagtgtgctttataaaaaaagttgtttataaaaacccctaaacaaacacacacgcacacacacacacacacacacacacacacacacacgcacacatacatgcacgaacccaccacacacacacacacacacacacacactgaggcagcacattgttttgcattactttagcgtggtattcatatggaattcatgacgtttttttattttcttgcatacgaaccccaccaaatgactgcttcatattgctcttttgagaattgttgactgagtggggctggctatgggctttcattttatacatctatatgtctacaagtatataaatactataggtatatagataaatagatatgaagttacttcttcaaatgttcttgccacttcctaatggaaattgcttctagtcatctgggcttatctgcttgggcaagagtgaattttccctggagcccaaagccaggagactaccgccacactaaaatattgtctagggctccagatgtttctagttttaaactttccactgagagctagaggattcatttttttcaaggaacatgcgaatgaatacacaggacttactatcatagtaatttgttggctgatatattcaacttcctactgttgggttatatttaatgatgtttctgcaatagaacatcagatgacatttttaactcccagacagtaggaggaagatggtaggagctaaaggttgcggctcctcagtcaatttatatgaggggagcaacaactctgtaaaagaatggatgaatatttacaactatacatataaacatctctataattacaactaaattgttctgccctcttcataaactcaacctgaagtgggtggttttgttgttgttgttgttgttgttgttgatgatgatgatgaattttagattttagattttttgggtttttttttcttcattgtgatgatttttttttttaatgctgcaagacttaggattactgttaagaaagtaacccaatcacattgtgaccctggtgaatatcagtccagaagcccatgaactgcatttgtctcctttgcattggtttccctgcaagtaactccacacaggattgtgggtgagaaggcacagtggttggaaagttttgagagcaaaagcgtctccaaactctctggtctagttgacgggctgaaatgtctaaacaaatgcaagtcattgaaccaggagaaaaagtgcaacagaaagctaaggactgctaggaagagctttactcctctcatgccagtttcttcttcttagcatttaaagagcattctctcaatagaaatcactgtcctatcattttgcaaatctgttacctctaacgtcaagtgtaattaacttctagcgagtgggttttgtccattattaattgtaattaacatcaaacacagcttctcatgctatttctacctcactttggttttggggtgtttctagtaattgtgcacacctaatttcacaacttcaccacttgtctgttgtgtggacaccagtttccttttttcatttataatttccaaaagaaaacccaaagctctaagataacaaattgaaatttggttctggtcttgctttctctctctctctctcctttatgtggcactgggcattttctttatccaaggatttgttttcaccaagatttaaaacaaggggttcctttcctactaagaagttttaagtttcattctaaaatccaaggtagatagagtgcatagttttgttttaatcttttcgttttatcttttagatattagttctggagtgaatctatcaaaatatttgaataaaaactgagagctttattgctgattttaagcataatttggacatcatttcatgttctttataaccatcaagtattaaagtgtaaatcataatcagtgtaactgaagcataatcatcacatggcatgtatcatcattgtctccaggtactggactcttacttgagtatcataatagattgtgttttaacaccaacactgtaacatttactaattatttttttaaacttcagttttactgcattttcacaacatatcagatttcaccaaatatatgccttactattgtattatattactgctttactgtg

SEQ ID NO: 35951 - DNA, 2091 bp, Mus musculus
aatcgtaatggtgggaaaacaggcgcaaacccatggacttggaaagggtgaaaggcttgtaaggtgggtttcctgtcgatccccagaagcagtctagcagtcctactgttcttaaaggtgcccttgcctttgtgtagtttttgtctcccttagagatggacaactccacttgctattatgagacaagttaggaggaacatatacactacttgacatatctgactaaaggtgtcccagtgttcgtaataagatgctgaaataccgacagcatgacacttgtcagttgaccatgaaagaagcatgtgtgaaaagtctgatgctttattaaaactattgcatgaaaactcaccaaggtcaataagctgttaacatacagtagatgcatggttcaggccttcgatgatgtatctagtcactcatggctttcatctgccaggaaaaaggaggccccagttcatttgcttgctatggaagttaggtatgagacatcaggggccattaagaaagctttggacgtggtaaggtttgaatgcccacatacattttattcagttcctaaaaacaatcaaaacaacttgacactgatgaacttgatacatttgactgtatcatatatagacccatatatagactgctccttatctatgaccactttgaataagaattcattgagccgtccaggtggttttgtttcttttttccagaatgttctcctgctcagattggcatccataagcaggtggcatatggtggatactactatggaagttgctggatactgatgtggaggtgtccatgccctttgggtcagttagtgtacgcttatgttcgtgtgagaggcttgctttcttaaactgctagtttgatgtactgataaggcagacctgactctacattttacatttctttttgtaaactgggtctttagaaagcatgttagccattgtgttaaaagaacattgttcccgtaaaatttagaggtcttaaagtttaaaatggaaagaaaggagccacaaacttctaaggattgtaaaatgtttggattgattctgatctagtttgggaaacagtggaggcaggggatattaaagaaacaaaagaaatgcattgtacaaatatgtagttttagtgcaggttaatgatggtggaggaaagtgttgctaatttgtttatttcccaggatggaatgggaagtgtgatatgcagtttaatttttaaggagctggtctcaattttagtactctctaattataaaagaaatcaatgtttcgttaaattttgtcattggtttgtcacaattatctaggggttcatatccaactctctgtggcaactcaattttatataatcttttaattgtttatgtatttctgacagtatgaagagaaagcatatgaggcatagaactgtcttttagaaatatggatgatgtatcctggaatgtgaaggtgtccctctaagatgaaaaatggaattattttactgttgtaccattgttagaccttgaatgaatccatgttgcagtgtgtgtctgtatatttgtagagaaagggaaatgacaattgaaaggttactttaaaattttcaaattgggcactgcctgtgttgcagcactactgtatctttgttgagcgacctaacagtatttccctgttgtgaaagttaattctgatgatgtttcacattcaccagctttttttctgtactatttgcatccccaaatacttagtacaagtagaattgtgcatggcttgggcattcaaagataagcgagcgatgagtcagtctgagtttctaaagccatgaaaacttgctttgagactgaatagttctgagttatttacaacagcaccaattgtccaagtttctttccctactgtaaaagaattgatcagtttcttcattaaagcagcaagaaattaattaaatttgtacataccatgtctcttagatttctgtgtatgttgtgaaggacattattttgagaagaaatgtacaaaggcatattacaaggctatgcatgcaccgtccaagcagtacatattcagaaagtcaaagattcctgcaaaataaattaataaactaaaaaca

SEQ ID NO: 35952 - DNA, 1209 bp, Mus musculus
ttaagtatgtattcagtcaattaaaatgtactatattgtaatttcaactatatttcttatactctaccatttaattatctcagctggaagaaaagcaactgtggcatgtaacagtaaatactcttctcaaacatgattctagtccaaataaaatttttcctttgaattgatgttttccatatttgagctcctattgaagaattatcaaattcaaaagctaaggggaaaaatatgtgtgaataaagccaataatgccttttaaatgttattacccattaataagatgttcttattttctggtatgatagaaaattatgtctacttaataactgacaaaaaaaaaacaagtatcattgcaaatgcctcacagtataaccagtaacttctcaaatatttagaaggattggttataactcattaacctagcttcctaacatcaattttaaaatgtatttgttttatagtaaaaaaaaaagaaaaggatactttataattgttttgttttgtcattttggaatggaaaatattgatatcttaatagaaaaagttttatttggaattaatggtagattgtccttcccctctgcatgtgctgctcccaatgactgaagctgctcggtgtcactgatacagctgccacttacgtgacatcaatatagaaagatcctgtgaagttattatggcagtgatacttttaaacttagttatatttctacaagggcaggttgagttcattgtaaataattgtgtaaatcactgttctagtaatttaaaaataacattaatttttctacaaaatgcgagatttataaatgtttgaaattgtacctattgataattaatggtaagtttacttaaaataaatgtatcccttatttcttatctgcatttctcatttccagatgaaagtttagttatcagagatgtttcagcacacacaaaagccacttttcagtacttgttcacatgcactgacgagctaattagcagcagaagtggtttctggaatgatgaacaccttaatcattctgttagaacagattagacagttcctacctcagcattttcagaaaacacactttcaaggccaaaagccatcatcatcagtagagtctccccttgctgagacctaattatctccggggttccatcctttacctcagcttctgtctagctgggttagtcagtgaggcctggaacactgttgct

SEQ ID NO: 35953 - DNA, 1571 bp, Mus musculus
tggacctctagaataatagcacacgagtcacagtttatggctataaagagtacaatctaatgactggacagtccgtgtaattgtgggaaagaatggcaatataattgtaatatggcaaaacttattatcaaatgatataattctcaaaggtatatttcccttgaaataacatcaatatctttatattttcacagaacatgacctggagctgtgatgcatcaattatattctattgacatgaaattaagtgtgccagtgtttgtgcacactttagtgtgtccagtgtatgtgcacacatcctttcatccttagaagtgttgcttctgaaaacttagaacttatttcagtccattattttaggccccagaaaacccttttaatcaagaagctagggttctttttaatcgggatgggactaaaaaaaatgagtttggcctaaaccataaagatcctgtggtgagctgttttaaaataaagttttctcctttcagacctgcctggcctgcagtgcgtgaaatacattgagggtcttcagtggagaacccagcagatccttactgagcacatccggatgatgcagagagagtaccagatcagatccgctgaactgaacagtgcccttttcctgctgagattcatcaatagcgatgtcgtcactgaactctttttcaggcccatcattggtgcagtcagcatggatgatatgatgctggagatgctctgtgcaaagctgtgaaggcatatgtccactcaagtgcattttactatagatggagaaagcggtcgtagctgtaggcagaagagtgctaaaatttgtgaaaccaaactttcttgtatttttacatgcatagtatatttgtattcaattgaagaaatactttagttacaatgtaaaaatccctctgctccatactggcttcttgtgaaggaaagcatttgcaaacaaatcactatttctgtatatctctaagagtgtggtactaggctaacaagctaatttcataaaaataacatctctttccattaaccccgccaaataaaatttataatattaacttttaataaaatttaaggtactaaccgttaaacggactggagagttttcttggggtttacagcttcaaatactttcaaatctagctaaaataactgaagatacaatcgtgagtaacttcatggaatttaatgctacagtatgtcactggttaaaaaaaaaaaaaggttattttgcctggcttcactgcttccattaacagtataaaagattgtcttcattcctgcctggaactcaaaaaacaatctatgtcctaagagtgaaaactatttccagagtttgaatttagaatttttctgtatacaattatgaatttgaactaaagttccatcataaatccacataatgccagggggcattatcatttcagaaagttcaatataaccataaaaccctcgctatgtctcaccttttaggtacactgtttaggtaactgtcaaattaaacaatcctgacatgtgagttactttctgcagcccctttaaatacaattcagaaaaagatttcctcattattg

SEQ ID NO: 35954 - DNA, 1227 bp, Mus musculus
aaatcgatccatttttatctccttgtacaaagctcaagtccaagtggatcaaagacctccacataaaatttgatacactgaaactaaccaatggttaagagaaaatggttaagagcctctaatacatgggcacaggagagaaattttactgaacattattattataagatcaaggatcgacaaatgggacctcatgaaattacacagcttctgtaaggcaaaggacactgtcaataggacaaaaaggcaaccaacagtttgggaaaagattttttttaccaaccctacatctgatagagggctaatatccaatatatacaaagaaaacaagaagttggactcaagaggaccaaaatggaatacagagctaaaaaaaaaaaaaaaaaaaaaaaaaaaaaaaaaaaaaaaaaatagaattcctaactgaggaatacctaatggctgagaagcacctaaagaaatgttcaacatctttagtcatcaaggaaatgcaaatcaaaacaactctgagactacacttcacatctgtcagaatagctaagatcaaaaactcaggtgacagtatatgctggcaaggatgtggatgcaatggtgcctcagtcggaacgggacgggagcggccgcgggtgcgcatctctcggggtcgggggtgtgtggcggggccagggccaaaaagggggagtgggtgggtaggggattggggggtgggtatgggggacttttgggatagcattggaaatgtaaacgaggaaaatacctaattaaaaaaaaataagaaattccctcttccagcagtcatgtagagtcatacacacatgttaaccaaaattgcacttacttcacagataaacatgtgatgtaaggatatctttaatttctattattaattagacctatattaaaagtactgtgtaaagatagatgattctgccaggatttgcattatattctacttttcctcatgtgggaaagaaatgagatctataactcagagtcttttctcaaaatttacgaggcagattatataccactttagacatggcataatggctgcatacttaacattgctcttaccaattattttatatagacaaactgtttttatcttgttttctggcattgtgaagcataagtcttttattcacatagacttactcatcacctgtcctcatgtcatctagcactgttctaggtatttttgatataggaagaataaaactaagaaaa

SEQ ID NO: 35955 - DNA, 1408 bp, Mus musculus
ccaccaggtgaaatatgagacttacacaacaactgggcttaaagtcagggcaaggccaggttccttccttcttccaaagattttcatattttcttaaagatttatttattcattatatgtaagtacactgtagctgtcttcagacactccagaagagggcgtcagatcttgttacggatggttgtgagccaccatgtggttgctgggatttgaactccggaccttcggaagagcagtcgggtgctcttatccactgagccatctcaccagcccctggtttattttttaattattatttgctttttgtttatcaagacagggcttctctgtatagctctaattgtcttcgaactagctctgcagaccagcctggcctcgaactcagagatctgcccacttatctttgcctcctgaatgctgggaccaaaggtggcataccaccacacctggcatatatattttttatttctatttctatttttattgatgccagagcaaacctaggacttagaacatgctgggcaccaactcaacttctgagctctatttacaactcggtgtgttagtgtatttgtcttagttctgaatttgtccttttttagtgttaactctaggctttggagacagtgaggtgcatatactctctccttctcaagaataagtgcttgaacaccctcacccacgcccacccacccatgctagtcttttttcttagaagcgtgggtcttggtatacactgtgtgtcattttgaggggtgaggtttaaaagtatatacaaagtataacgatatggtggctactctcgaggatgagacagaaggaccaggagtttgagggtagttcagatatgcaataagttcaaggccaacctgtactttgtttaaatagtaagacagcatctcgataaaataataaaactaaagtctcaacaaaataaaagctttcacctgttaaggtgcttgattgtccttggagtcctccaagagtaactgctatgttaatatctgtagaaagatgtttatatttgactgtaccatgatgaaccgatgccaggtgaactcgtttaaacaaaataaaacactaattttaccttaaaaaaaaaaaaacatccagtggaaaaaagacagcattttcaacaaatggtgctggcacaactggcagttatcatgtagaagaattcgagttgatccattcttatatccttgtactaaggtcaagtctaagtggatcaaggaactccacataaaaccagagacactgacacttatagtggagaaagtgggggaaagcgtcgaagatatggtcacaggggaaaaattcccgaagagaacagcaatggcttgtgctgtaagatcgagaattgacaaatgggacctcaaaattgcaaggcttatgtaaggcaaaagac

SEQ ID NO: 35956 - DNA, 1460 bp, Mus musculus
atttgaatatctaagaagcatttcaaacttaacaacttgaaaagtaaggccttcatagcctcatattccactgcctttcctagttttttcagatcagaagcaaaccttttttgtttggttggttggttttggtttttttgagacagggtttctctgtatagccctggctgtcctggaactcactttataaaccaagctggcctcaaactcagaaatctgcctgcctctgcctccagagtgctgggattaaagacgtgtgccaccacacccggctgaagccaaccttttaatctacaaggagaccagacgttctcaaccagagtcgccatggtttcctgcttcaacaatgcttgaactgaacaggtgcttgactgaccccctccaacccccactggccacttcgagcctgagccctttgcaacttcctcactctgcagctccagtgtctccactcagcctcaccccaccaccaccatgaccaccatgtctccctcgcaattgttccagaactaccaccagaacgcaaaggctgccatcaacctgccagatcaacctggagttgtatgcctcctacatctgtctgtctatgtcttgctattttgacagagatgatgtggctctgaagaactttccaaaatactttctccaccaatctcatgaggagagggagcatgatgagaaactgataaagctgcagaaccaacaaggtggccaaatcttcctgcaggatataaagaaaccagaccgtgatgactgggatagcaggctgaatgcaatggagtgtgcactgcacttggaaaagagtgtgaatcagtcactactggaactgcacaaactggctactgacaagaatgatccccacttatgtgacacattacctgaatgaacaggtaaatccattaaacaactgggagaccatgtgaccaacttaagcaagttgggcacccctgaatctggcatggcagaaaatctctttcacaagcacacagtaatgagagctaagctcccaaagccacttgactttacttatcattgaggcagtacatgcatgtcaggctgcctttatcttttctataagttgtaccaaaacatctgcttaagttctttaatttgtaccatttcttcaaataaataattttggtattcaatctgcaaggaattacatgatctgggtctgtgaatttctggatagtatgtgtgttttcaattattcaacttcagtcaactgatattttccctagtattaaacctatgagacagaaacaagatagcagaccctagtattcaggcacaggaatgagatttgcctctagagttcagcattattgaatctcattctaaggctaagcattaaatacagttctctgatgctcataattggactatgttccttccattcaagtgtcactgatactatttagagtgctaggaatgtggtcgacactaataggttcatgtgg

SEQ ID NO: 35957 - DNA, 1164 bp, Mus musculus
cccagaaccgttttcgggaacttagaggactcgggctttttccagacttagtggtgtgcaggtgctcaaatcctccagacacacctgtgaaagataaaatatcaatgttttgccatgtggaacctgaacaagtgatctgtgttcatgatgtttcgttcatctaccaggtacccttattgttagaagagcaaggggttgtaaactactttcttcagagacttgatcttcctactgagagagtcacgaaaaatgctgatgtaatggaaagagatggcaggcagatacgatcacttgctggagacctgctcttgtgggtaaatacactaaatctcagactcctatgcctttgtcattaaatctctagaacattctgcactggctattaacaagttggagatcaagtacacagattccacagacctggagccaagtaccctgcagaaaaagcctgtgcgctaccttgaggcatggcagaagctctgcagtcctcatggagtgctggttccaggaggatatggtgtttggggaacagaaggaaaaattcaagcaattgcttgggcttggaaacagaagaagccttttttgggtgtgtgcttaggaatgtagctagcagtggtagaattttcaagaaatgtgctcagagggcaagatgccaatagtacagagtttgaccccaatactagttatcgtgtggtcatagacattccagaacataacactgggcaaatgggtggaaccatgaggctgggcaagaggagaaccctgttacggactaagaactcagacatgaggaaactctatggagacacagactacttggaagaaaggcaccaccaccgatttgaggtgaacccagtcctgaaaaagtgcttggaagagcaaggcttgaagtttgttagccaagatgttgaaggagagaggatggggatcatggagttggaagatcatccatttttttgttggagtgcaatatcaccctgagttcctgtccaggcctatcaaaccctctccaccctactttggcctcctcctggcctctgtggggcagcttccacattaccttcacaaaggttgctggctctcacacagggacacttacagtgacagaagtgggagcagattccccaactcagaaatcactgaactaaagtttccatcaataag

SEQ ID NO: 35958 - DNA, 1869 bp, Mus musculus
ccgaggagcacatggacatgcacctgcagttcacatcagcagaggtgacctggcctggcctggcttggcctcctaggcagttgggttctgaaaagggcagtgtcaggttttcacagaaaattctgagataccattgactttggactgtctccagggtcgaaagaacacagaaaggcccattaggttatcagagacatgcagctgctatcaaacctgcacctttctcggaaaagaaatattgaatgtctttgaagaaactatccgagagagtcttctaatccttttatttttatttcactttagataaattgaagaagcagtttttccctctccgagttcttcaggactacagaaaagtcaagaacatagcagagcagttcttgtcctggagtggctactctgaagtgaacctcagcaagctcttcgccaattacgctgggaagtcctgagagagccgggaaggatgcaaggaggccagctgcccaatctgagctgctgaggcctccgcctgccctaactgctgcaccactatcttgcttttcttttgaggactgcatactgtgttgatgttgatgtagatgtggaccagggtgggagtatcaaaatacttaacttaccaaatagtttttatagcactatgtacaccaaaccctttcctaagtatctaaagacctatatcttactgcagggcagaaattgctactttaattgagaatacctaagatgtaagtgaccttcagtttaccctggggctttatcagagacacccctaaaaagagttttatggggtctaatggaagttctaacattttgctttttcacatgtcagttaaacccagtctgtgtctaaatacttgttcagctactggctacaagcatggctgatttcagtgctgtctttcatataagtggtgcaggtggtagggaggtggtggtggagggatttagaaagtttgcacttactaaatacaaaaagcaagtttgcttattgaattgttcaaagttcaacattcaccagatgtttcactcacattccttctattttccctttacacagaatgttcaaagtgtaggtttatacagtaggaaagcacattttaaatactttgtcctaacatttcacaaaatttatggtgaggttgtagtaaggatcactgttccattcagaagaatgggacacagctgacaggatccagtgcttgctagatttcatcagttcttcagaatagtgtctctttgaagtgataaacaatattacaatatggcagccttaaatacttatctatttgtctttttataaagaaaaatgtattgtgatctgtacctaagaataaagtttcctaaaggaaaaccagttactgtgttttgttttgttttgttttgttttctaaattgggtacagtaagttgacggaaagggatgaaagcttgattgaagaagaccattcattcccttcccaaacctcagctggcatcccttcataaccctccgagtcagaacccagtccgaagatgttgagcaagatgtctggatattgaaagtactgagaagtcctgtgaattttgagtcctttgatctattaagcataaagaagactaggggtggtagttttttatccagaaagagagagagagagagagagaagggacactaaagcgatagacaagctcctgactcccaggagagagctatcccagataggaaagaaacacttggcaagccgtggatgtgaagaaatacttgttaaaaccgatgaagtcttcttttgtctagctttgccatttcttttctctccctcgtctcctcttcaggctcttaagctgctcctctttctcttacactcaaattttaattagaaacactgggttt

SEQ ID NO: 35959 - DNA, 1187 bp, Mus musculus
tctgccacatgcttctggtctctgtggtcacctgtgacatacacatattatatacataaataaaaataaaactttttaaaatgtgcttcctagccaagttagttctttaggcaaccttgtgcaagtcctgactaatatgcctatttatataacatgagccaaaaattagccacagggaataataacttatcactaaagaggaaaaccaatcagcacgctgtgaaacaaataccttccaataaactttacaaagtctctcagcacatcactgtcccattgtggatagtattgattctgactctgctttggttgcagtgttttggcttcaagagttctgatgttgtgattagcctcctttcttctatctcttctaaaatattgattaacatgttgaagtgtgtttatgcacatgtcaatggaaagactctttcttccaggtagatactgctctattttcatcagcatcctttgtgtagaaatgttctaccagttgctaattatatttgcttctaacttgtaattgtcctcaagggttttgctcaaaggtttttcctaaagaaaatctgtatcattttgatcagatactgatggtgtcatggttttataattactttggccctggactgagaaatcatggaatctgtcccctttgactggtcatttaaacagcattttaaaaagaatgagtctttttactcattttactctagaatcaagttgctcaagatgatgaatcataaaatgtatttacataatttgtaaatcgtgctggctggtaagagcaggtgtgactatgtaatgatcctggtcagaggcttgactaagtatcactcctacacttagtactaagtcatatagtgtggtgtacattgctggcaaagtttaaaagaaagaaaagaagctctcatgaaattttatatgaggaattttaatctctcatactggaaagaaataggaaatcattcttcccacaaagtaggagatccagacccggcttcaaataggtctgtattctagtggaggagctagggtaattcaaccttcctacactccagtgctcaaagaggaagggaggcccaacagctttattatcttagagttcctgagcaataagacgagatgatggagagataaagggatcactattagactaaagcattgatttttttttttcaactggggtatct

SEQ ID NO: 35960 - DNA, 1242 bp, Mus musculus
ctttcctaaataattttaattcttttaaggcacaagaattttagatttgctaatcttatgataaatgagattgctttattactcttgcggtacagtacttttacgttttagatttctctgtctaaatttcagttgatgtagtaacagctaactaatgttgtataaggctcggtccttgctttatcttcaagtttgtaatgaatgactgcagattagaattattgatcagtgtctctaaaaataatgtttatttttggtaacatgatttctgtgctattttcaaagaggaaatgaccttctctgtaagtcctgtcttacatgggatgtaaagtagtgagttcatggatttccatttgactttgtagttcattgtgatgatagcaaaagaatagataccacgtacttctaattagggtcttaaagccataaataacacataaagtatagttaaaaactcttctagaaaagtgttgtgtgccaagaaaaaataaagtaagtttgagccataacattgtttctggtaataaccttgtgtgtacttgtttatcctggcttctatagggactggatatggaacccagtttgtatcgttgcagtaatgttgattgtaaggtttcaccgttgaccttcatggtacagctgagcaacaaattgatcatggacattagacggtgcattaaaaagtactatgatgtaagtatctgtaataagacattacacactccatttactgaggtttaataattgttttatagtttttattgcagttgagaacacttaggaaattcacagtaaaatactactaataaaatgtgacacacttcaactttaaaatctatctatctatctatctatctatctatctatctatctatctatctatctatctatctatctatctatctgtggggtggtacaggataatgcctgtatggaggttacatggagggagttggttctttctctgtttccatcaaattgattcctagggattagaattaggtcatcaggcttggtggtaaggccttaatcaactaagctatctcacctgctcaaaaaatttgattttagtagtatgatacaaactttgatttttctcataaatgtcatatctctttaattattggagtattaagattgaaagtttgattagttttctgaagaagttaaaagaaccatcttttaaattgaagtgcagtttgagatcaaagagaatgtctcattttcatatatgtacaataa

SEQ ID NO: 35961 - DNA, 1257 bp, Mus musculus
tgagaacatgatgttgtactttgtctaagatgctgctactgaattataaccactgaattagattgcaacatacatgctgttaactattgagccaagatgaaatcgaccgctgcattgaaatcaaggtttgcagttgtgtctgcatttgaaggagttggaatggcagcgaacataatttctttaatgggatttttgttctgttttcagttttaatggttgcactatattttaagagtatatattagtaacaggatataattatttgagttttttatgtaactggagaaaaaccctatgaaatgctttggagcatttttctacatgttgacatgtttctacattgtgttgttagagttacttgtttgattcatattcttataaacagagaagtaatttgtccacgtgatcttgagttcaagtggtttttatctgtgtatatacaaacttggaaaacgttcttttgtaagaatttactttggggatattttgttttggatgaatactcttaatatttttgtttgtttgtttgcttgataggacttgactccactcaatttagagttcatcagtatcacaaagatgaagagaatgatgccctccttggtggtccagcacagctaactgatgaagagaaatacaaggattgtgaaaaattcaaatgcctttgtccttcatgtggaactgaaaatatttatgataatgtctttgaaggctcggttagttattctgttttgtttctgtctttcattttgtttggaaaccaatacagtacagagtgcccttccctacactttagagaacacacagacacacacagaatatatataggtaatctagatgtttcatttatgtctttaaagaattttagtaatgtgagttctgctttcataacttcatttccgctgagaaatgtttaatcgaatgtgctttaataattgttttttgcctccctagagtgcttgaccttttttttttaaatggactcttttaaaaattctcattatctcaaaatatttttattagaactccttaattagtaacctttgttttcctattaccagctcccacttattaaagctgagcaatacctgggtttctcttaaacaaacaagtattaggtttgtctttacatgagcgtcccccccacctctttgttgttgttgttgttttgttttttttttttttttttgttttttttgtttttttttgacaaaggtgctttttagttttttgttgttgttttttgtttggtggttt

SEQ ID NO: 35962 - DNA, 1126 bp, Mus musculus
tttattgttgtatctattttatacatacattataatttcattctttatgtctagaaaattccattatgcataggtataatgaatgttttttatctgaacctctgctggacacctaggctaattttataactaagttattatcaataatgctacaataaaaatttatgaaccaatagttctgtgatattctgatgtcgagtcttcccagtaaatactggaaagtgatgttaagttctgatttttgttctgttacttaatcttaatgtttttaagttgtgcactaaataaatctatgttatataagttgaataataatttttaattatgtgctttcaagttttattgaagaaaactcaggaattcatagcatgttcatcttttccctgttaggcatttgaaaatctgacaatagtatttgaaatttttacaggtaaaaagtgaagtgaataaattgtacaaactgcttgaaatagacattgatgctgttttcaagtctctgctgttgctgaagaaaaagaaatatgctgctctagttgttgaaccaacatcagatgggaattacattaccaagcaggagctgaaaggattagatatagttagaagagactggtgtgatcttgccaaggacactggaaagtgagtttaacttttatttacttttgttgttggtcttttgaatttttgtttaaaaaaaaaaaaaaagatccaagggcaggggctggagagatggcacagcagttaagagcacttacggctcttccagaagaactgggttcaattctcgccatccaaatggcagctcacaactgtctataattctaagatctgacaccttcacacagacatgcatgcaggcaaaataccaatggatgtaaaataaaaagaaataaattctttttaaagaattcaagtgctattgaaatgtctatgagtctgccaagtataaggatacaacttccctctttgttgttattgttactattacatattacaaataaaatttaacagattaaaagttagataatgctaaatttgcacaagaagagacactggttttaagatagcatctcctggtgagaataaatctttacacctggatccttagagagctgattttgttgatagt

SEQ ID NO: 35963 - DNA, 1201 bp, Mus musculus
cttatctgttgtacctgttggaacatatctggaaagatgccagattcattttgcagatcatgtgtgagctaaatgttcttccattagcattgcagatcactaacatcgctgggaacattatggtaaatttaacttagaaatggggaaaaagcatttcctgttggattcagtgtttgcttggggtagttgttatatgataatgagtctaaatgcatgcttataaaatgaggaactgggattctgaaagggcttcttttgtaaaaggaaaaatggttgggagaaagggaggaatgccaggtgcagtatgtggagatttgggttaacataaggactttatctctaacatctggatgtttctggtgcagtgatatcgtttggactaagaaaataatcacacttgtcagtatttgaagctccttttaccccctaaatgcttaaagagaaagttagaaataatttagtaaaagcaaccttggttattgtgagttgctgaaggaggtgccatggttaaattaactgactcaaagctgattttgtttgtggttgttttgagttcaaaaatttaaaaattctgtttaatagtctaggacactgatgggtggacgatctgagcgaaatgagtttttgttgcttcatgcattttatgaaaacaactatattgtgcctgacaagcagattttcagaaaacctcagcaaaaactggtgggttcaaaatcatatagtaccttgccttttcttttcccttttttttttattacctagatagcctttagaaatattgctttaacatatgcttctaaaataattaatcccctctaaactatgaccattctcaagtttgctgcattgtgtctgtatggttgtttttgtctctactttctctgtaatgtcaatattatttgtgaaatgtctttgaggactttaatagacttctttgatgaattaccatatatggaaaatatttgcctccactcagatttacccaaaggtaaatgttaattaagtcttttgtagttttaacctttgagcttttatgtttattttgtactatctgtatgcatatgtatgtatgttgaatatccctaatacataatgtttggaattggaagtgcttcagatttacttattttattttgaaagatttgtatatatgtagtgggaaatcttggggtgaggatgtgtgtccaaacactaaattcac

SEQ ID NO: 35964 - DNA, 1183 bp, Mus musculus
tgacttcctgggtattgggaaagtggtatcaggaaatattcagagaggacagtatgcagcattatcattgtgaagttttatctcttaaatgagaaaccaaatagagatagcagcctggaaaatacacggaacataacggtttttagatcatttcagcaaacacttatttaccctctctgtgaacgtcactgtgaatgcctgctatatatgggacaagccttcagcttccccttactgggaaggaagccttggtctactgtacagcttagctttgagaaagtggaactaatttcttctgttgtgttgtggttgaagctttggtggtaattggatttcctttgggaaaacttatcatgatctttcattctaacttggaaggcaagtttttgattaaagcattctgtacatttgtagatgtataaggatctcggcttgactgttgttttgagatccagcaacacggctgattgaagatctaggccttcttaactttttagggctcacaagaaatttatatttaaagcaatttctatttagaagcatgtagactctgcaattggactaagatgagtgatagaatctcatttttccttcctatagttgtgtctaaaccaaaggactgtattttcccatgtgatttcaaagaagtgatttcgaaaaaggtaaatactcattccctttaaatattgaatatctgtttggaaagagaataggagaatggaatggactagtagaaacaatctattctgtattttaataaaatctattcttggtacattaaattgataaaatgcattaggaatataagattagacctgtaataattcttaagttagtttctgaagataatgaaattatgacatggatacattcaaatttcccttcagttagcttatatggaagcttttccaaagtgatcatgtattttgggaccatattgggtagagctcttacccaacttgagggaaaccatatagggctgggaatactgtgggtgttaaagggccatgtaatgacagggttgatatttgctgacctaaatgcctcaatatttttttttaaactccaaataagttctgtgaagttggtatcataatcccttaacaaatagcagaggaaacagtataatgaactcagttcttcacaaaaagtaaatgtatttgctctaaagaatgtagttttt

SEQ ID NO: 35965 - DNA, 1197 bp, Mus musculus
aaatgcaataattttcttcctggaaacaagtatttttttgtataaatccaggtaacagtaaaataattgaagccattacattaataatacataaaatctttttataagtgcgaactgtcattatctttggtcagggcaggacagttaagtatttttagtatgcagttctaactgactaaacacttaaaaacatttacaggcaattccttcaggaaaacctgcttcccctgtcctcaggaatgagcctctgttaactcccattcctcttaaacgtgctgaacttgctggtaagtctcatgttaggcaaaagtgcaagttgttgagcaacaactgccacacatggaagcttggtgatacagggtaatgttgaaggtggcaatctaagcatgaaaggttgaatttatagtagtaaaagttgaaagcatccaagatgaagagtaaagagaaatacaatataatgtaggaaagggctgttatttcaatgttggaccagctttgtaacatgtgatgggaatatatggtgatgtctacaggagagctggctcagccagaatgtccagaagatgagcaggagctaggggtaatggagtttgaagacggtgactttgatgagtccatggacacagagaaggtagatgagaagcctgtgactgctaagacttgggaccaagagactgagccagtagaaagggtggaacatgaggcagatcctgagaggggaaccacatcttacttgtaagtgcgttttatgattgttctgaaatatagtactctaaatattctgttggcttttataaagtttttgaaaatgtgatttctacagagaaaattttctgccagatgtctcttgttgggacattgatcaggatgatgaaagcatacctcaggaagttcaagtggattccagtaatctcccattggtaaaaggggcagatgatgaacaagtgtttcagttttattggctggatgcttatgaagatccatacaaccaaccaggtaatcatacctaaggtaatcttagacttttattacacagtgtagtgcctgttcccttaaatacgttagtgataccgattgcctttgtttttctaatagaatcagacattaatttgtctcttttaaagttaattaacagtttcggggtggttgttgtttgtttgagacagagcctctctattatgtagctttggttgtcct

SEQ ID NO: 35966 - DNA, 2961 bp, Mus musculus
agacgcagcttcgcgttggtcagatagaaaagtgtgacccttaatctctcactcaaaggacagttgtgtcaaggtgaactccacccaaggcctgccatgcttctggctgtacattttcatctttggcatgaggagactgttttccagaaattacctgaattgatgggaatcacagcaaggaagcccgtcttatctaaaaaagaaataaccacacaaaccttcttagcaggagctgcgctgctttggctccatgtatggaagatgaaaaatatctcttggagcttcttaaaggatcagctctttccatttctgaccacatcacagttcatagactcgaataacagtttgatgtaacaaacacttagtataccgatagggggtgctacctgcacgtatctgttctatgtatcctccaatatgccaccccagggtgtatcccatatgcaatatgaatctatggtggtggtgttggactctagatccctctcctgctctcccccatgacaccctgctgaaatgcttgatctcaagaaccgcctggttccctcatgacttgggcactttgtcaaaagctcaatcaaatgttagattccggtagaaatgttttgtcccagaaaattcctgttgttcttcacccatgacattttgggtaaagggaaggctcaatcttttgaatggtctgagagacactgaagttatttctggcccttgcttctccaaatgggatagagactctcagatgactggagaactacatggggccgctgttccctaatcacatgcagggaatgagcaggtccagtcaaggtttagagctaatctcttaggtacaaatagaatttcctgagtatcctagtaaagacagaaagacagcactgcagcttgactaagtgaaggccttaacatgtaactggtgggcaaagtccaacacctccagtgacagaaacaccccctgccttcagaggctttgggaacatgcattctggggggggggtagggagacaactcatgaagaaaggtaccctgtctttcccctttgtgttggggtcaaactacctccctgctcacctgaagatcagtggtgactgttgctaaggcaacctggagcctccttgttcctggtacttcttccagaagtttgtaaagtgctcatgaaagatgggggatcgctgggaatccagcctgcgagaaagaaacttcttttcatagtcaaggccctcttggagaatcacaccccagaggcaagggcttccattcctccacggtatcggtttgacctcagcctcccaccatgtacccaggacaaattgtgcgtgtatgccttctatttcagccagctgacacttgtggcagtgcagggacaaggagagcaactgagcaaatgaagaagaggagaagagggtcctagagagaggaaagaaagaaagctaaaaccatctacgctcttaagccacttctggttgtatgtgcggagactctctgttgaggaagcctttttaaaaagttctggctctatgacccagggcagataggtccacttttacctaagtcttgctctgaggcagagaatgtagaggtgacatatcaggtgagtataattttgcaggccctacacaccatcctgccaggtgccacatacgtgactcatcagagagtgccactgtagctgtgaatgatgggaagtgaccaacatcagaatcatcccaggtacaaacagacacttaagtgggtttaaacttccttctcagtttgcaacagcatctcctcaccttcccaaagccacgagcttgccaccaagaaatggggcggattctgctagccaacctttggcccttcttgaccatctcacaggccttcccagccctgacccaggtttaccaccccccacacctgggaggagccatgactgcactttgtgtgggttcttcaggcaattctcatggtcaagggcgagttaaggatcgaatgacagcataacacgtgctgcaggcttggagaagtaagaaaagggatagaagccggggaatgggctccttttcctccatgaaaggaaagaagctacttagagaacccattccctaaggttgggaatgggaagatggaaaaaatgacactggagttggtgagtatgggaggatttatattttctactttccttccaggcatcactaggaaggaggaaggcttcctattgtatccttccatggctagtggatccccatgcagcaggtggggtcctggcctctccagcttctttggcatattagcaattctcatatctctccccacccctggaaaccaagtgctgactctccatgtaaacaacaggggtgtagttgtaatatggtgtatggcccatgtctgccacaaattgtcaggataacccagagacaaagataaaccaggcttgtgacagacacagtgtggcttctgacatgctgtgggtgggggagactcagccattctatgacctaggctacaagatactgcggttacactggtgggttgtggccacaggaagaacatggcttattttccctcagtcttcaggactttttaaaatgcccagtcctactccacagatgagactggttttcaggcatctactcagcaactccagtcttgtcctaaccatctgatgaggaaggaaggaaggaaggaaggaaggaaggaaggaaggaaggaaggaaggaagtgagcaagagataagtgagctcattaggcaaattttttacttctcctcttctctagttttctgttgtgtcgctgcagtgtgtctggggacaaagccataagaagcctatctacttaaaattctgctgtacatagaagccgagggcttgtctggattcaagaatgatcttatgcccaagcatttgctctggtgctgaatagtgcaaactactggaaccaccccaaccctaccactgaaacccctagacccaatccagtctcctgatc

SEQ ID NO: 35967 - DNA, 1669 bp, Mus musculus
tttgcaaacgtcaaagatccatatgtgtagtaactgagcaatgctggccagccctgcagtttgctcagtaaagaggtgcagaagtgtggcaggtggggctggtctaattgctctcccgctcagcctgacatcaccaattgattgaaattggcccagtgccaatagaattcatagtgacaacagaattgcttcatgtttcaaatgatcttaccctccagttcttcttgagaaagaaaaagtgcaaccttagcactcagtgggaacatctcttaggcattgacgcatgctagtcacaaggagattgtgacagttaaccgtgacgacaaggcagtggcagtcaccacttagctatgctgaatgtcaggtccaggaagagtctatgaagtcagtcagggcaagattgaaatgtgatattgtttacattgtggaatccatttcacataatggcttgctttctctttgtcatttgaatcatttttagaagctttaatctttatcttaattaaaagcatatttttttaagaataacttctacctttatgttaaatgttgagcttaatatcccacatgtaattaggagttttgaacacattgacaactgaagcctgtaacttacagggagatgaaaagacttgagactacctgccgctctaaagggaccaggctggaccttgcagtctcacttggcaagtcctttcaggaagcagaattttcccaattgtttatccagcatgaaaagggaaatagaagggccaaccatgcctgttccctttcttgctgggtgttatataacttcctggggaaacatcaccaagtcaattgctttcttttcacatcaaaaaggacctcttacgcagggtggtggtggctgcagcgcacacctttaatcccagcacttgggagacagaggcaggctgatctctgagtccaaggccagccagggctatacacagaaatccagtctcaaaacaacatcaataacaaaaaagttcctcttagagctgagatattatttagaccaatagacatttgtgagactaataagtgtatcttgactcagatggcagcaaagtttacttatagtgctttatagcactaagtgatttcagatgttccgggaactttgctggggatttagctcaatggttgagcacttccctggcatatgtggaggcctggcttccacccctagcactgaaaacaggaaacaaattgctgtgaattgtcatctccacagttccttctgtccattgttccagctgcttctctcttaacgccgtactcagaatcggagctcaagttgtgattgcatcagtcctggacaataacactattagaaaaaagggaaggctaaccctaatctctgctgagttcgtactttaacgtgctttgaagttataattgctgcttaaggtttataagcagagcatttgctcttccaagttcccacccaagtgcttgaagtggaactgtttcccatatttcgagcctgaccttagaaggcctgggaagcactcgggctgttcgagaggtgtgagtgaaaaaggtcagtgctttgccaagttctctttgtaactccttgactaattagggttgtctacatgaaataattgctgctttgataagagacaaatattaacttacacatgaaatgaatgttcgttgcaga

SEQ ID NO: 35968 - DNA, 1204 bp, Mus musculus
actatttaatcaatgcaggatttttgtttgctgttctgggtgaaaagataacttttaactccagttcctgtcacactgattagagctatcagtacctcctggcttgaaaacaggggacatgtgaaattttaatgaacttgagaggttatcagccactggcagtgattaattagttaattaaacatgggagaatacttcaaactaggtggacataatcagttatcaagagaagtataagcgtgttttattagcagtttgtagacagtctccctgatgtctggtgttgaccattttaagagctttgctgtgacatattttcttttcaaccaaacattttcaaatgtgattcactaaaagaaagctctgttggtcctgaccaggtgcccctgcaatcccagcgtgcacggagtgagagcagggacaaatgagaggccagactagggtacaaagtgagagcttgtgtgaaaaagtaaaggagaagataacagagggaagggaggaagaaaggaagaacaaagggcaaagaagggagggaaggatataaggaaagaggcgagaagtctttgttgtggcttattcttagtatttacgaatatgcattcaaatagtttgtaggtccggggcctactgtagaagaacatgagatactgttctgaaagtgtatgtgcaggtagatcatgaggcaaaggcttatttggaatgcttgtaggattgaaacttcaatcagtagctggaacatcctagttgccagccagcagcaaacttatcacctgcagaattcccattcaatgaccaaggaccacatccccggaactgtgcatgggacagggcatttccccgaggccagccttcaccttgagttgtgctggtgtgaagtagatgactgaacgcaggtgtccttagctaagcaagactgggaatgaaggtagcagacaggagtcatgggaaggaagatgaagtccagccttcaatttcaataatatgttaccatatgctagaaactatactcactgctggacatgtgacagtgaccaaagcagagtgaaatccctgcctcaggagcttcccttccagtggggacaagatagagtgattttgtgcttcacttaggaaacaagaactgtgggggtaaatgagaggcttaaatgtcttcaggatttcccaagtttctcgttttaagatatcagtctgaattgtgaaagtc

SEQ ID NO: 35969 - DNA, 4153 bp, Mus musculus
acttgagagaacaaaacttttgtaaagtttacataaataatagaatgctactttttctggagtaactatagaaaacaattctgagtcaaggcaaaggttttggacttattactgtaaatgttctgaataagttttggttaaaataaaggagactatactcatgagctctctggatccttttctttatagggacaagatcaagagtaatagaactttctagaaagctgagtgctgtctctgaagtctctgaagaaagaataccttctgcaagtcaaccagagacgcgtatttctaccaactcttaaccatgacggcactattgttatcccaatgcttagttgctttctttataatggctcactatgtccatggagcccttcccatagtctttcccattgtatcttccactaaagcttgagcaatttttcattgtgtcttgctgtggcatcattagcacccgtcacaaaagagcacagaacctcctagcgctcttgtaccctatattctgtatcttgttatggagtttagtgtctgaagtcttccagcattctgagctcatttctgatacaaacctccagctagggcttgggcagtcggatgcatcagtggagctcatcttgaaaattcagtaccagggttcttcctgtcccatatacatcacccttcactctctgatttggacctttgtgcccccttcagctgactgggttctcattgtgaggtgtggtacttggatgttagaacctgtccatctgtatcaattttattttaaagttcatttgcttacttctgttccattgattaaagcactctaaacgttgtcttggaatttctcacttaacaccttggtttgaaagatttttaagtgaaaagtcacctgctaatctattcagactacagagtgggaagtgcaggggtttgtttccatgaaagctccactatgtttgtttgccatatgaaattcctcttgtagtcatcttaggaactagaagttcctgtgtcatgtaacagattcactgtaacagagattgtcacgttttcaaaaatgttacaaaccttgataattttcattgtcattactttcaccagttttagaactgtccactcaatctgactttttctttctttattttgttttgtttttcaccatcgggtttcactgtgtagctctggctgtcctggaactcactatgtagaccagactgacctcagacacacagagatcatctacctctgcctcctgagtgctgggattaaattcgtgctccactaccacctggctctcaatttgttaatcgttagaagtaggacttagcagaggtcttggggtgagagaagagaaatgatgtgctatttatccttaacaatagaggctatctgagagtctggattcataccaatacctagcctattcagctcgctgctatgtgtttccctcttggctatatttttccctgtatatgccattcacgctgacttctagtatcatttactatatgtatgaatgtttctgtccagtcatcagtgttgaatctagatttagttttagtttgtagccaggcatctggcaaacacctgcaatctcagttctccagatcttgagacaggaggatcatgatcatagcctgagctatgtaccaagactctgcttagaaaagtttgaacgtgtgttcatcattgctcctttctcattagtgctgtagcaatgtagtcctccccaccgcctccccagtgaggggctctgcctcggaggcttgctctgacttagccagacttggctcacttgtaggtctctttgaattgcacaccatctgattttcttccatttccttgtattacctgagtccctcgtggctccttttgtctttataaagacctcattgcaaagctgacatgtagtcaaaaaatgttgataaaattcaaagagactgagactcataggtcacaagtctaagtcgtcttaagtcggtgtcttgaaggttaagctgtgtgaccattttcctatgatggagaagctgtgaaaatacttacatttaaagacattgactaccttgtaagcaccagacagtatgtccatatcttcctgagtctcagtttccagccatccttctttacacttgcaagtttgaccatgggagaacaacaggttcatattatggttaccttgcttcagcaccgtttttattgtttaaggactgtctgttgattggtctgcttccacaacagatgccacagaagggttgggtattgtgtagaaaaactttatcatattctttgtccttttgaaaagccagcttttgtttaaaggtcttaagatttaatccacagttctctaatattcttgggcttatactcatgtctgtctaagcctggtgcattccagacattcctgtctttgtgtcatcaataatttaacctcagccccaaaacagtcataagaggagtttcagggacatcctgtattctcaaagtttattctccccgtgactaatttacgtatcctctctgctggcagtgcatgagcctttgagctctatgaatttctacatatgttacagattgatgctgaccactttccagctgaattcttccccatttctctgtaatgcccttccgtttatactttcgtcctattttacgtatttggggagctgtgtatacaatttgaagcagtacctggcacacagtaggtacttaatatgtatgtgttcagtcaaaagggtgaaaactaatagaagtttacaatggctggtgaggaagcctctttctgagttcttcagatatccgcgacttgaaattggtaatgattcatgtcaagagctggagcagtactgaatttctttttatagtgctaaaagacggctttaaaaatgtggagaagtgacaggaatcagaaatggatccacatgagccgtctgattctttgcctctgaatatctggtctcagattccttatagaagggcttcttcctatcttgtgacatggttttatagctttcttaaggattccaaagaactcaacattcagcacccgatgtgatccttacgatggcaggaggtggactgtacaaagtagctttccttttccatgtgacttcagagcactttagtggcttgccaaggagccatggaaagtgagtagtagaagctgtgttctatgcttgggtcttcttgttcctgggccagtgctctgaacaatatgtcaagtgcttgggatccgcttttaagatgaatttcttgagcatattaatcctaagtcagaagttttctgtaatgcaagacagttctactcaggaaatgtttccttttgtgcttttccattctggcatgtttaaaggagacaagtggaccaggcggcttttgcctcacgaaacagaactttagaccagtgtgggtcatgactagagtttatatttgaatgagatcagtgcctgctgccagcctttttgtataaaacttctacatttggaagttgatggttttgtgttttggtagactcaattacagcttcaattaaatgctcttgcacgttctttctgttgccattacttataatagctcggctagctgtcggagccttggatctttagcgactttatggtctatagctgctggcgctctgaggtccttaagtacaaatggatttttttttccttcagttttgtagataacctgcttgcttggcacggctgcctgtttgttcttggtattttgtcacttcatttcagtatagctcagggttggcagttgtcttttggcctttcctggcacacagtaagcttccgctagtcccatattaggccttattacatttcatatagttttgtactgttcttcagaaatgggtctctccatcagcatgtgttacccatctttcccatttatcttcctttatggctttctttcatctccgtgtcttccttcgtgtgtgatctctccacgcccgagtctcatcccccatgtcacctgctggttttctctgctggtttccccaggccctgtgcttgctttcacatctttcatgaccttatcatttaatttacttctcgtggcttattactctccgatgccttatttctttgaggaccaagccttttagtctaaatgtagtggtttctgaaatcattccttttccagaatggatttgtgtatc

SEQ ID NO: 35970 - DNA, 1190 bp, Mus musculus
accaggctggcctcaaattcacagagacccatctgctccttctgcctcctgagtgctgggattaaagagggtaccaccaacacctgtcctcttttaacaattttaaggacgcagcttagtattaataagtacaatcccactgttgtgcaacatagttctagaacatttttgatttgggggattgaaactgtacctgataactctcaattccccatttcctatccccgacctgagctgcaacccttctacttttggcacagagtcaccaagattcatacatgttgtgccttgtgacagaaggtcatggcggtaaaactcatttccctgtgttaaatacataagaacttgacttgtgacccaggagaaatgtctttcaagggaacttggtatttctttagattaaaaagcttgagtgcagggtctgaaatgcaattgatgcaggtgcactgtgaaacactaatacatttttttgtttgtttgtttgttattggagacagggtttctctgggtaactctggttgtcctgaattcaccctgtagaccagagtggcctgaaaactcacagatgtccacctgcctctgtctccagagtgcagctagtaaaggtgtgtaccacccccacctggcctgattaggactgtcacactgaaattgagtatagcctagactggcactcctgtgcaagggagcccatggcagacttgtctgatgagcatcccaccctcagaaggtttgccctgcaaccagggctctggcagaccccagctctcctccagaccctgccactggcccggaaaaggccatctggggtggcttgctgtggctctccttgtgaagccatttatgtgttttagaacattctaggttactggcacggaggcaataagtaagaacttaaagcgcagtcttccagactgcttcttgcatgcctacagctgtctgaggctgttaagtgggaagtcctcctccactgcccccaccccggttcctcctcatcagttgtttgacactccctgcctgcccacctcatctcagttccttgtttcagtggactgggctgctctgccttttagagggttgaggttggagcagttctgtaacaagcattgatccacatcaaggtgcagctccttagcatttataacatgggcagtgctgtgcagccaagccctccctctgtttccaacaca

SEQ ID NO: 35971 - DNA, 1191 bp, Mus musculus
aggaggaggaggaggaggaggaggattactatcacgagaacaactattacaacaataacgactactatgacgatgaagactactaccagtacgaagacaactattataaggacgaagatgatgaaatctactacgaggctgactaccaggaggagggagaggatgaagaggacgaagaggatgaggatgctttctatgaggctaactatttcggtgaggaggatgaagaggagccagcggagccagctgagccagcggagccagccaaacccaaggaggaagcagacgccgctgaggcctcctctggaggcaaattgcagtacttcagcgcctgaaggccacaagccccagctgctgcccatttacttagccacagaactttctgcactatgaacgcctgcctttcgatcgcttgctctctctctcaatgaaagtatcctttcctctcttgttttatgcactgtaatatagaaaataacttactttgatgatcgaggtcttggcggcttgcctgaccctgaagaaaagaggggtgtgtgtgtgcacctacattatacagaaacttaccctcaacactaggccactgctgaactgtcctctctgagtgccctggattctgccactttgaaattatgtgaagtttctcaacagtcaagagccgttactcagaaaagtctctcgtaagtaagccgatttatgctgacccattgtatcccttttagtaggttttatgtctctttgggaaattaagtagaggccaaaacgtcttccttaagattgctagagtgaggccgttcctactggaagaggccagagatcagatagtggcactggaatatatgggtgggggctgctgtgctgtgttttgtttgcgtgtttgcagtgcatccacgctcttgggtgtctgcagttggaaggtagaattccgatcatttgactaccagtcccttcctaagggaaaggagaggctggactttggtttgttgatttactgtttcaaaaggcctggtttgggggctctggttcactcagtacagtcagttgtagcattccggagaaatgggaaccaaactgttgtcagaggaagcagccaaaagaggctgtgatctgaatgaagtacgcagttaaaaagaaatgatttattaaaaaaaaaaaagtaaaagaatgagcactaagattgtgtatgtaaaa

SEQ ID NO: 35972 - DNA, 1180 bp, Mus musculus
ttccatgaataagctctgcttcaaaggatgacaccaagcatcaccaagcaaaatacctttgattagtcttctctatgccctaggaggctggccctgtcttctgtgacatatagcttctattcatggaggatctactagtatgagtttaaggtccttacctacagtacattatctgctatgactcaggagaaaattctgacaacactaatgtgacgccattctccaggagcatccagccccatgaacacgaatgagatgagcagacagatagacagggatggatatgctcactcaactccagaacacttcaccagccctgatcttaaggctctgagtttaaggtgactttctgagaaaagtcacctggttattaggacactggtctagggactggtcctaggctggtcctcagttgccttttttgaatggactaacctaccatttgaccttgtcattctttaatcattcccaggcccttggagcatcaccccatcagaaaaactaccaaaagaaatggctggaaaatggcatctgatcttcaggcctggggaagaagatttaacgacttggtttcctgttcattcgctgcttttccaggagtgctgctttgccatagactgtgggtctggccagctgacccatttcggcccaccattccacatttccacatggcttttcctccgtttaatgaaaatgttggaaggtaggtcttcttgcttctccagggtctgtttggtttccccaagtggggttcactttcttcctttcctcaggtaccctgtggcttctctcctcctgccctcataaaacaagttaagtaaaaccccaggtctcagaaaaggccttttggagtctagtcacagacttcctagtttaaagctgctactctgactcctgctttcccatatcaagtcagagactccgtgcttccagaccaaggcccctgaaatcagataagaagctgttgactaagactgtgtgcaggctggcctgcgcacatcacctttgcttttttttttaattccagtctttccccttagggtgttcacatcgctcttacttaggcctgctaaaacacaaagagccctttagggctgtccaaaagatggaggtcccaagggtgtctttaggctctggttgcagattttgttgatgtggcaagtgggcatagaaattgagc

SEQ ID NO: 35973 - DNA, 2465 bp, Mus musculus
aatcttgaaagaaaacctgaatgagccatagtcgcctctcttcaccaagaatgacttgtttgaggagtaaatcctacccaaagcccagcctgacaacctcatctagcccatcatcatgaagagggcccccacactcttacatccaccctcatcactacagatgtgggccctagggtggcctgtcagaaattgttggtgttagtagtgagcattaaagatgtcacaaattcaaaagtaccttcatatgggattcacagatgaaactcctttttgttgttgttgttgttgttgttgttgttgtttttgtttttttgagacagggtttctctgtgtagccctggctgtcctggaactcactttgtaggccaggctggcctctaactcagaaatctgcctgcctctgcctcccaagtgctgggattaaaggcatgcgccaccaccgcccggcacagatgtaactcctaaacaaatgatcttttcttacttttttttttttaacaggaaaaacaactcaggccgtgagctcaacttttaatcttctgtggaaagcttcaaagcaggaaatgcataccttgatcaagaaaatggtgaacacgttttatagaactgatttcctttaggcccattgtcctttcctgggacagaaaataactaaactgatttagggaacagccaaatattttctttcaccttaaagttcttagagaaatgtatttttcttatgagacaggttttcattttcttatacatgttctgttttatgacttaatatttccccatcaaacaaaaggatcttagggaaaacgaggtgaccaaaactaaagaatactattagtggtgactaggggacaatcttaggcaatatggccatctgtcaataatatggattcgtttattttcggcagctttttttttgtcaaagttgtataaagaaaatgactcttgatattagctgatttgaccattggtcccctttaaaaatgaaagttctatttaactaatttggttacttccatagctggaagggtacttgtatatgagaaattttatttttttcaaagtttagaatatctagtggaatgcatattaatatgccactcagagggtttgacaaaatgaacagtgaaaaccaagccttcactgacaaaggactattaccccaatatataaccagctattaacactcagacttaaaaagaacaaaactcagaccagacactttactaaataagattctttaactcctagctttttgacctaagcagctatcatgataaagttgccatttcctgagttgggaatgttccctgggcaagtgtatactatgttaccttaccgaaagcttaactacatttcctaatgtttttcctctagacctgtccactgttgagagcctcaggagtatactacagttctaggttacagtggtcaaaataaaaactgatgtgatctggaaggcagaactggagcatcagctgttccaccttgaagatttctgccaggtaccaggcactgctgcagttcacacacactgttgctgacctggtacctcaccctgttaagaggctccagtgatagtatggaacaggggtaggcagtagctgtaacttcagctctcactggatctcttccccctcagcttttctgaatccagggccaagtttctatacagctcagtgagaagcattcaaggcagtgagccccagacaggataatcctcactggttccatcaaaccttgtgagctttgatttcttttgtttcgtctcccacttttcttgctttcttgcactgctaaaccaccatgaatcaggttcactctctgagacagaagcaacaaccctccatagattccagtagcttccctcaatgattcttgatggataatgactttgctcttatccttcaactgttttctcccacaccttacttccctagcttctgccatgattgtatggagcctgattcctaaaaataaatgctattctatagcacacacagtgattccaattctttcttgaaacgccaccgatgcactgccaaaggagctagttgtgaccagaagttcagattcaatgtgtgaaaatttagatttcctagtcagcatccaggtaaagattttgaataggaaagcttgatgatgtgagtagtatgtggtccaggctagagatggaaattgacaagccatacaggtaaagcaaaaaaaatcattatcagtgtataggttaaatcaatgtataggtagtcttaaagccacaagatgagatgaggtcactaaagtactaaaggctagcagggaaaaatcagtaaaaatactggataagaccccggagctcttgactctagctgcatatgtatcaaaagatggcctagtcggccatcactggaaagagaggcccattggacacgcaaactttatatgccccagtacaggggaacgccagggccaaaaagggggagtgggtg

SEQ ID NO: 35974 - DNA, 2443 bp, Mus musculus
aactatgatttgttttattgccctgttattcttgaaagctgtcttttttgtgagaacttttaaaacctacttcattttttccccagaagtaatataaaacacctgacattgaaatttatgaaatttaagaatcatctacaatcagtacagaacaaatgattggactatttaacatatatttttttaaataaactgaaagataaggaacactttacacaatttatatttctctttacataatctggaaccacacagttcttttctttttaaagcacaatattgaagcctttaaaaggtatttaagggtttggtcaagtgaatataaaatgtgtctgtataaaaagaaaatgaagtagtcactgttacgtactgacattagttacaacctagttttaattcttaaaacaattttgattagcaaagctaaaaaagggtgtttcagttaaatgttttaaagaggtacagatttttacaaggacataatataagttattgttctgtagaaatatcctattaaatattgtatgtccctccctctgtatactttgtaaaaaaagtaaaatacataaaaagaaaatcatataggggatgtgtgacattattgtaattgtgtacttgagaataacgtgcaaaaataaaaatcagaatattttcctgttaacgaatgttcagtctatttgataccagtactaagttaaagctttttcttaagaaagaaaatgtacagtttttgtaaacctaataaacatcaaaagcagtggattattttcatccccctatttcttaattccttttatgcagcagtggaatgcaaaatgcttggttgctttgaattttgtgacttggatgcaaatactggtatttcagtcctgtgaatttgcaagtaacattgagaagttaagaggtgattggtgagtcctttgatgagcatgtccttgaaattcattttttcttttatctttgtaaatgatttgttttattagcatctctgattcctgttataaattacccacccataaagtgggtttgaaagcacttaagatttgttttattatcagttcacaacacatttcatctgaggccctaccttttagttacccatttgtgcccaggttggaggcctctagtagactcagatcttggaggatggtcactgtcgtagtgaaaatggcaagttggataaaggttgggaatcctgagaaatgtgcagcacttttgatattaacaatgagattctgtaatctagaaaccagcgttggtctgagagatgaggtgacaaataactaaaccttgaggtacatgtccacaagaatgtggtggaagtcagttgtgagtctgagcatacctgatctcacccattctgctaaaatatgctgccttatcgttgccagggatctcggtattaatttcctgcaaaatcttacatttgtgtaaggaaatgcaagctcagtcagcatcttaaagaggatccatgtccaaatgatgcctgtcagcaaggtagcctgccctcttagtccagtccccagtgagccgggacgaggcatgagcctgtgtttcagcaggctccccgggttgttctgctccaggctcaggttagtgaaagcgatcctagagcacttgaggaacggaaagcttacttggtgtgatgttttgtgtagttgtcaaggggctcagcaaaagcagctagagatggtgcagtgagaatacattataatccagagactgactgcctttagcctttccgtaaaagtcctgagtcttgtcagtcactaagtccgtccttcagtgcacgtctgaacagcctgtccctcctactcttacatagcccccagtgttgcattcctcaaacgtaggaagacttgataagtaaagagaaggactgaaaattgtgtgttcttgtgtgtttaattggcccagagttaataaagtaattcatattaaaaaggacattttgctgcattttacaactttttaggaggtcaaagttaagtttgccctatggattttgtttttatcttttgtttcatgtatatattgtttgcctttttcataaaataattcttggatttgttatatattgttcctgttatttttgacatctttgctattgtaaataaattcctattttgttttaagttaccctagtggagtgttggctatagacaaggcatacatgggacacttcagcacatgtcacacacatgcacacagaaatgagacttggaccacacaaccaacccccaccttgttagaagcccagtgtgctgtgaccccttcactttcacacttctcaccttcaagggaaccactgtggctttaagtagagcacctgtaactactcgaagtttatttggctagcctgactgactagcaagctccagggatgcccctgactctgcctcccccatcctgagatgagaggcatgtgtcattgtgggagttt

SEQ ID NO: 35975 - DNA, 1147 bp, Mus musculus
taggatcttttgcaactttatatatgtaaatgtaccctgaattatatatatctatctatatatacacatatatatgtaacatgtatctgtgtgtattgcttattttacatacttatacacacaacccccagtagtagttctttaaaatctataatgaaaagtattaaatttacagtaacatgaaagatccagggatgcaagagagagcattttgtaagtcttgctcttcagagagactactcaggtgaagaattagaaggaaaataaggacactagtatttttaaagagtaaaggtattttcttttaaatatctttggtaattgaaaaatagaggttaagatgtttatagatacaatgttttcatacagtttcaactccatgcctttatatttttctgaaaagctaatgggtatccagacatgaatcccccagttctctctgataagccggagagggaactcttgtctgaccaagcgagggggacagaaagggagtgatggctccgtggaccagtgaacgggtgctaaggaggacttagactcggccagttgagcctgctctgttagttcttagttaactagaaaaacttaacactcgcttgtcttggattacacgatagaggtgtggtccaagtgtgtgaacagtctgaggcctcacttggatccttaccaagtctttcacagttttgtttttgagagctggcaatttgtaacatacaggtctgatcgctgataaaatttgtaaaaataagttggatattaagatttttgttaagatgtctttttggaaaaccgtttctagagtccctggaattggctgttggcacacgggtctggcacatcacgggagacttagatgtttcttcccactcgatagctgccttgctgcctcattatggtgctccatccctttcgtgccgttagttttgaccttccatccttctctttgtcatcaagatttgtattcaaaagttatatttttggggttagatgtcttgagtatttggtgtttggcaaacctctgaagtgctagatcgatttagtctagttctaaatcaaattcttaaggctggtatgaagtccatcctcaatgccagtcaatgccaaggcagggttccctaagcttcccacccgctagggactcctt

SEQ ID NO: 35976 - DNA, 1098 bp, Mus musculus
attcttagagctgctgttttccttgataggtggaactgtagatatcgtcgaaagtgagcctgagaatgagcatggagttgaactactcgatccaaacaatagtattcgcgttcccagggaaaagatggtttatatggctgttaacgactctcagcaagaagaagaagaactgagtaagtagatgctctttctgtgttcctaatgttttctctgtctcttttcaatggtcagtatttgaaggaagtaagcggcatcatttgagaaattactatgctgccatgttctcagggaatcagtattcactcatgtaggtttagaatgtttgctactttaaaactagattatggtgaaaaccaagagaagagttattcagcaagtgtttattttacaaaagctgtattctagctaatgtttagcttcccatttgcatattagctgaattcaaatgaaagtatctctcctatgagctatgagaacctggtcagagaagttcatctaattttctacttagatgtcgctgagattgctgatgaagtttatatggaagtgattgttggagaggaggatgctgcagctgcagccgcagccgcagtgcatgaacagcaagtggaggacaacgaaatgaaaaccttcatgccgattgcatgggcagctgcttacggtaagtcacagagccactctttggacatgaatttgtgattgaaaagcagtttttgtgattttaggtttagaaatcggaaatgttagtactatataaggattatttgatttaaacaagagcagaggaggattataaaactactttttgtcctgattttaaacaagcatttcctcctgtttacattatataaggaaataaactgtatgaagcatacaggcttttaactgtatcaggtccatagctttaaaatcttgggggatagcatgggacccctgggggaaaattctgatgcatgtttccattttggaagctaggcatttccagtggtcttactataatgagtatgctcataaaacttgggtatttttgtcattcatgagtatcatggcttttcattgtgggagttaataaagaattcctaattctttataatttat

SEQ ID NO: 35977 - DNA, 1533 bp, Mus musculus
ataattttgctggttgaaatacttagtgctgaaattcatgattttaattacttactgtcttagctactattttgttgctggaaagagacatcaataacaaggcaactcacatttgagaaagcatttaaattggggacttgttcatagttacagaggcttagtctggcatcatcatgtgacaggtgctgaagtagtagccaagagctatatcttgatccataggcaaagacctttacattttgatccacaggcaaagagttaggaggaggagatagacacatacacctgcatgcacaaatgtacactaggcctgctgcttggcatgagcttttgaaaccccaaagcccacccctagtgacaccctccaacaagtctacacctcctatccttataatctgctcaaatacatttaaatatatgagcttataggggccattcttattcaaactaccacacttatgagtttggttattttttaggagctggtgctacacacatggatggtaatcaaattgttgtggaagttcaagaaacggtttatgtgtcagatgttgtggattccgacataaccgtacataactatgttcccgatgacccagattcagttgtcatccaggatgtcattgaggatgttgttatagaagatgtccagtgtacagacatcatggacgaagcagatgtatcggaaacagtcatcatccctgaacaagtgctggattcagatgtaaccgaagaagtttctttaacacattgcacagttccagatgatgttttagcttctgatatcacttcagcctcaatatctatgccggaacatgtcttgacaagtgaatctatacatgtgtctgacgttggtcacgttgaacatgtggttcatgatagtgtagtagaagcagaaatcgtcacagatcctctggccgctgatgttgtctcagaagaagtgttggtagcagactgtgcctctgaagcagtcatagatgccaacgggatccctgtgaaccagcaggatgaagagaaaaacaactgtgaggactaccttatgatctcttgtaagtttgggggggagtatggtgtttctcacaggtacttctaaagcctgtttatctaacgtacaccaggggtgaaattaaatgtccattaaaatgaaatgtataaaaataccttgtccaggtgtgatgatacatacctttaatccatcacttgggaagcagaggcaggcagatctctatgagtttgaagccagcttggtctatatagtgagtttcaggacagctaaggctactcatagtgagaccctgtctcaaacaaaacaaaacgacatacatctctgtaaaatgagttttggtttagagtctgtaaggtgactgaaatttgcgaagagtgaaatagttgatgtgtttctatataaagatgtgatagaaagagggtgtcttcagttatagaaagacagactgcaaatcatgaaggatgtcatttggcagggagggatagacacacacacgtgcaccagctttccttagtgtcctcaaacaa

SEQ ID NO: 35978 - DNA, 1184 bp, Mus musculus
aactgattactactgataaataaaaactcagtgatagcagtgaaaataaattaaaaacggacacacctttaatcccagcacttaggaggcagaggcaggtgagtttgaggccagcctggtctacagagtgagttccaggatagccagggctacacagagaaaccctgtctcaaaatttataaaggatagctgactttgagggttaacctaagagaaatgagaatatttggagaaatgatggctggctagtattgaacaacatggcaagatttgggaacaaagtattttttaacttcagagggaaggtattaattagatttttttctttttgtttttttgagacagggtttctctgtgtaaccctggctgtcctggaactccctctgtagaccaggctggtctccaactcagaaatctgcctttctccgcctcccgagtgctgggattaaaggcgtgcgctactgcacctggacaaattagttctcttgagtgtagcagtgaaaagactagtcagccataacattttattaaatcaaggtttttggaggaccataagcaaaaaaaagtgattttgcatattagcaatgtgaatatctaagaatccttttgatttgtctaagagtagtcaaggaattgtgtaggtatatgaaaatagaacatagccatgcctggactatattgcaagactctgtctttctctctttctagaaagaaaattaaagaaataataaaacaagtaaactatccaaaattcctaatttaagacttggaagtaccattgcttttcctattgacttggtgggggtgtttatttatttttttttaaaaagatttatttattattatatgtaagtacactgtagctgtcttcagacacaccagaagagggagtcagatcatgttacagatggttgtgagccaccatgtggttgctgggatttgaactctggaccttcggaagagcagtcgggtgctcttacccactgagccatctcaccagcccggtgggggtgtttatgttgccctgttttaaagattggaagaaaagaagtttggggggcatttcctgggttttacatagtttaatatttctctctttctcttttttaaaactgtttagaaaaatttattttgaaatttaaataaaaggaaaatttagagataaacccccctttttaaaaaag

SEQ ID NO: 35979 - DNA, 1809 bp, Mus musculus
tgtagcccaatcccattcatcccctcatatccaacctttgcccatgcgacctcccccaaagtagcacaccaacaacagaacaaagcctagaaaacatgccatcgtggaagctgtagcttctgtgacaacaacaatgttggctcctcatcaggactccctccagttatcctgttgctgcgctgtgtcatagagatcctgcagctttggaacagcagggtggccctttcacgatccccaccattcgaacatgacatagattttaggtgggtcaattcagagccccggataagggccaggatggtagctgagctggtcagctggggcccattcttccaagtgctgcggcttgtgagagcctgggccaattctccctacagaaggtggcaacgggggagggtgtcccatccacaccacctcataacagacaagtggcagggccagctgtccagagtgctatatccaatgagggatggtggcagacctgcacagcctcagacacccagtgttccctagtggtaataatgagccatggacactgacccaccactgtggatccacagactcaaacaaggccctgatggcagggatgcccacttataacaggctacttctctccacccttgaattcctttttctctcccgtctgtcatggtgacaagcaggtatctatgcttatgcactggagggcaggactgtgggtggcatggaggtctacaagaccttgtgttcctcttctcatgccgtgctgccttgctttaatttgatttttatgagtcctaggcataagacaaggtttggccatcaagctaggatgaacaaaggactgccatctgctctgcccctgataaagaacaataccaccaataaggggtctctgctggttgctggggttgtaacctacttctaatatggggcttaaaattaaatgtgaaaagtggtatactatatacattggatcaagtctatatagtagctaaaattaagcattccaaagtaatgtctaatttatcaatcaatgaaagtttgaagtgaaacttggctgcaaccagtctttggcgtagcacttgtatcatgaacctgtctaagatgaaaatgatctcttctcatgattcatctgtgagtagctccatagtgaagggcaattagtaaaggctaaagacttacccctttatttgtccttctatttggggttctgttgtctgaaatttgaaggaatacgaccagtgggctcaaatgagcaccactcttagaagttgtgtgcccattcccttaacacaggtagatctgtcttacccgtttcctgggtgggaccttaggaatccagtgccctgagactatgtctttattatttatgcctagtatctcagtcttcccacactggcaaagagtatagcaactggtggttagtgataattgacaaggttctgtccaggctgcttttttgaggtctttgttttagtaagctatgaatggagctgtctcttgcatgatgaataaacactctaccattgtctccactgcccctagctgtagtactggctgataggattatggtggaaattgtgttattggtaatctttgagccttgagagaggtagaaattgttcagaaactgtgtcctctggtttctaaatctattccccacgtgcctccaattttcttgtgctgtgcattttaaattaatcatgttttttcttaattaaatactctttcacagcaatgatttccaactctggctgacgtaagaattgctggggaagtttgaaggggggaaaaagaaagctctggggtggagtccaggctttgata

SEQ ID NO: 35980 - DNA, 1177 bp, Mus musculus
aatagtgaccctgaaattttcttctctctaattatacaggttaataacttgaatgtggaagagaacaacagtggggatcaaaggcgtgcctcactggcctcagggaactggaggtctgctccggttccagtgaccactcagcagaacccacctggagcaccccctaatgtggtgtggcagacaccactggcttggcagaacccatcaggctggcaaaaccagacagccaggcagaccccaccagcagcacgtcagagtcccccagctaggcagacaccatcagcttggcagaacccagttgcatggcagaatccagtgatctggcctaacccagtgatctggcagaatccagtgatctggccaaaccccattgtctggcctggcccaattgtctggccaaacccaatggcctggcagagtacacctggatggcagagcccacccagctggcaggctccacctagttggcagagccctcaagattggcagggccctccagattggcaggtaccacctgactggtcaatgcctcctgactggtcctttccctccgactggccttttccacctgactggatccccgccgactggccaattccacctgactggcagaacttacgaccctcacctaatctgagatcctcctccaactctcgtgcctcacagaaccagggtcctccacagccccgagatgtggcccttcttcaggaaagagtaagtgctgtgcctctccacttagtttactgcagtccttccatttataaccggcggccacgttttctacaaacatcattttaattacttctccccaggcaaataagttggtcaagtacctgatgcttaaagactacacgaaggtgcccatcaagcgctcaggtaggtcgttctgtccttgatgtccttgataggggcatcttttgcttattctgtcccctccctcccatagctgctgattgtacttgagaagaacctgactgggctaccctcagcagggctggcacaggggctggcactggacggtccagctcactccaggtgcttcccttctctcctacagaaatgctgagggatatcatccgagaatacactgatgtctatccagaaatcattgagcgcgcatgctttgtcctggagaaggtaaagagtcagacctgagaaacaagaatgatggcaagga

SEQ ID NO: 35981 - DNA, 1035 bp, Mus musculus
atccagatctccgaggctccgcccaccagccaggccacagcagctgccagtgggccaaatgctagtccccagagttcacagcccccaactgccaatgagaaggctgatactgaggtttcagcagctgctgccaggcctaagacaggctttaaggcccagaatgccaccacaaaggggccaaatgattactctcaggcacgtaatgccaaggagatgcccaagaatcagtctaaggcggcctttaagtcacagaatggcacccctaaaggtccacatgctgcctctgacttttcccaggcagcacccacaggcaaatcagctaaaaagtctgaaatggcctttaagggtcagaatagcactaaggctggccccggtaccacctacaatttccctcagtctcccagtgccaatgagatgaccaacaaccagcctaagacagctaaggcttggaatgacactactaaggtccctggagctgatgcccagacccagaatgtaaatcaggccaaaatggctgacgtagggaccagcgcaggtatctctgaagctgatggtgcagcagcccagacatcagcagatggctcccagactcagaacgtggagtcccggactataattcggggcaagaggacccgcaaggtgagatcccagctagcttccctttgctttgggctctctcctttcttccaatttccttggctccaaacacaataaagggcatggatttatctgtattttggcacagttgtagggggtgctaaggtaactattattcctgagcccaggttgtccacaggctgatgatgagttgatacaaggacacaggcaatatgtgtgtaggccatcttacattttgacattaaacaccatgtcttaagctaggcaggctcacacagaatcaattagatcttgaagatgtacctcactctctagagagaacagagtcaggaagaaacgagttcagggtgaaaccaagcactgtccgtagtcacacaggaaaaggagaaatctaggtcccactttctgtttgtttgt

SEQ ID NO: 35982 - DNA, 1225 bp, Mus musculus
tgagtcctcttgaaacagtttattttaacaatttgtttatatcagttaaatttcatgttttaaactttatattgttacaaaatggtaactggtttagtattcaatgttttgcaatatattttaatctatgttccatttccgtgtttttcttaagaatttattcattgaaaataattactatgcatgtagaatctgccacattccttccaaattttgctgattgtgtccttatgttcacttgatttctttaatttcgttgttaatgtcttggtcaaacttaaatattacttttgcattcatgttctatagcattccctatcttcgtttattaacttagaacatctggctttctgtttttgtgatgctaagagccttcactgatcagtacatttgtttgtggttactttttcctctgctatatggaattgttctcctacaatcactaacacttaggggaggaggagatgtttacagcactccagcaagtttaatataaatatcattcagtgccagaatgttttcttaaatgatgttaaaactaacaagacaaaataggaaagagaactgtgtttgctgttgttattgttgacatttctgacatcctttgctggtgttagggaggctgtattgtagaattgccattcaggactttgatatgagagaaactcagggtccagtttgtgctctgtggtgttggagaggttgtgttaaacatactcatctcactaaacctcagtttcctgtttactgattaatgtgtgtgcacacgactaacattccttagacttttttttctcatacaattttcaacacataagtaaaagtatatatttcagcacattttaatgatttcatatgctatttttacatactcagttttcttgttgttagggaaaaataaggataattcagccatattggtattcagtcaataaagtgttgtgagtttatagtgaaacaggaaagggtctctttattccttaccctaaataattttctctccaattgtgagaaaaatcagaagtgggaacactgttcatgtgcttatctacataactctccatttgatcagtctgtcagcatccttgttctgtttcgaacatcggccttctttctctgtgactgtggagtctttgattctttcaaaatatgataaaggtgcagagggcgatgatatcctttgtgatctgaagaaaacattgtttatggttttccagaactgaaa

SEQ ID NO: 35983 - DNA, 1210 bp, Mus musculus
aagtgtgtttacaggaggcagatgttaatggaaacactttatcctataagatctgatgacaagtacctctttcaatttgtttgccgtgttttctactagaaaagagttattttgaaatactcaaattcaatactgttttttgtgaggacacttgaagaaaacacttttttatagtactttggcaatatataatttgccactttgaaatacattatatactactacctttataatttttatattgtttgaacccatttagtaaaaaggtaataaaagtacacattaacttttaatttaaagaagtattcagaattttagtgtgtccaagcatcaagattattattgacttagcactttgaaaagattttaaagactatgttagaaatgcattttcatgagttaaacatttctcattttattcttcaaggaatgcaaagacctgaggtaaacacagactttataagcattattaagatatataaccgtaaaggtattttaaaccgtcactttgtttcttttaaatttcttccaactaaagactatactaaaatattcttatctatagactgtagaatttccaaaggataaaatttaatttcttgatgataaaaaatcatgttgttgtctttctgatttctctccataccattgccctagcatgaatgactgtaattacagtgactacacgtgacaacacatataatgatcatacttctggtaatataaatttgacatttttgaaatgatgtcttgatttcattttatctcctttgccttttgtgtttctgtagtctttcttgatctattaagattttctaattgtattaataacaaaatgcgttatatgaagattgttttcaaagggccttgtttagccttttgatcatgtaaaatatgttaagcttgctataacttgatatttcagttacttaatattgtactgttaaataactgaaagtcttgagtattataaataaaacttgatggattttcaggtcatctgtcaggaaattttccatcatggaaaagaaaaggattatagtgtaacaggatatttagaatattagctctctggagttattcataatccattagtattaaacctatttaataatgcaaaaaataacttatggaccttacccaaaatatgtcataattgaaatgtaagactggactacattgtatgtgtctattgcttttgaacactgca

SEQ ID NO: 35984 - DNA, 1187 bp, Mus musculus
aagctctgaccccctccagcaccctctgtgaaaacagtgtctccgagctactgaccccagccaaagccgagtggaacgtgcaccccgaatctgacttctttggacacgaggaagaaacccagttcggattctcccacccaacaggaagccatgggtctcagaaagacacagatcttatcacggtgactggcaccccgtttttggtatgaaccgactctgcctgttccctgcctgccctgtggctcactttgttgttgttgttgatgttgttgtttttatcacactcaaatgtgagaatgttctggaaggagcgcttgcttgcctgcagttgtttcttgctgccttgcaaaggaacgcatctgtggattaccaatttagggatttcagttctcatcttgagtctgggactgataagttctctgactgtgagcaagtctcttaaccgagctgagccttaattcattatttataaaagtagtcttttttttgtctagcttatttctctttccttttcaactgcatttcaatttttttgtacacctttggtgtaattttttagagtatttcatagtggttacatatgagtctcatgtaatgaacaggaatgtgatccctttgaacattaaatgatcagagatagaggaactcgtgttttaacttttaccatttatcttaccttctttcacagtatccattgtatcagtagagtgcaaaaatgttgtattttatgtggttgtttgatgttttctcagtcttcttatgttgtctttctgtagaagggttttttttaaaagaaaaatatcagggatttgatatattacaagcatattctaaaatattgcctcgttaccattgaacaagtggccttatactagtcatttagtcttgccaagccttactccgctagctttacagtgctgatagaaatgcacattattctcatgcatattgtatctattgatgcttgagattgttactgaagggaaaatatatgcttgggcttttctgaatcttctttagttgtttctttctttctttatttctttctttttttctttctttctttctttctttctttctttctttctttctttcttctctgcctccttttttcccctcttcaaatcctagagtacacaagataggaaacacatgtatcatagttttcagccaataatataagtatt

SEQ ID NO: 35985 - DNA, 1164 bp, Mus musculus
catgggagccctaagcagtcgaatgtggtccaggagaaatcccgaggaaaatgaacctgttagagaaggcgctggtagaggggaggaggccgtggaagccgaagaagccgcaggaccgtccgttgtccaggaagcgcaggcaagtgaacagccaggcgtttccactggtcagggaggccacaagcggaagggcagccgtagaggaccgttggcaaaagtaccccgtaggacactgtatgaatcactgttcctgaggggtgaaaatagcgatataaagatctgtgcgtttcaggaggagtggcatttgcacaagtcctatctgtgccgctctgggtacttttctagcatgttctgtggggcctggcgagagtcaaatatggatacgatagagatgcagatgcccgatgaaaatattgatcgcgaggctttcaatgatgttctaggcttcttgtacagtcgaagaattgtaattcctccccctcgagtcattgccgtcttggccacagcgaatatgctgcaattggatgagttaattcagcagtgtgaggatatgatgagagcctcagtcagtaccgagactgtgtgcaactactactactctgctgagaattacgggctccagagcatcaaatatgtttgctgccagtggctcttggacaacctgatgacccgaaaaaatgatgaactattgttaggaatcagtgtggatctcatgaaagagctcattgcctcttcagatcttttggtggttggagtggagatggatgtgtatattacactgaaaacgtggatgtacctgcagctggaagcacgcacatgctcaggatctgaaagagtattactgcctgaagagttgagctttgcaaagttcagaagggagtcagataacagaccttttctggacagtgatcaggggagagcctttgtgtcagtgttccagcgactaaggcttccctacatcatcagtgacctgccttcagcacgcattattgaacaggatagactgatccctgcagcatggttgactccagtatacaaagagcaatggctagcacttcttcaggcagagcagtccagggaacttgggcgaatggatatcaatgtgtctgacatccatggaaacagcatgaggtgtggaggccaacttttcacagatgagcaatg

SEQ ID NO: 35986 - DNA, 1440 bp, Mus musculus
ggtaacgcaagcatgtggaccctggcagacagcatgttttctagctttcattttatttaccttttgagcccttccttctcttgtgtagacgttttgaaagtactcctgcctcttgacttttattcttttcctttctttatattttgtgcttgttttttgcaaagtatcatgcccatattgtgtggtttgttgtattaagtttctccaatggagcattaggggctcattcaacaccaggagactcgggatgacagatgacaatgctatttcaacctccaggaattggtcatctccttgggagacacccttgaatgagacttgccagcaatttagaagatggcaacattgtccagaaaaggcattaggtgattccttggtccctcttgctactttgggagaatctctccacatcctgcctcctccttcccttccctgttccagctcacaagtggatggtacttttggaaactgaactcttgttgttttgtttttttattgtaagtcttagcccttaatggctgagttgtctctttaaccaggatggcacttttaggaatggtgactgttacagtcatggctgggtggcctgatccacggtttctccatcctgtagtcattccaaagaagaaaatccacatggcatgtacatttgtgagggttgggtctattaagagggggctttaattattcctgttactattggtgcttattttccccgctgtatatgggggtggggaagggctggggtaaaccagaaatgtatatttaggtcacgttaaataaaatggctgggggaagaagaaagatatgagtctaggtgtaagagttctctcttccaggacagaaaggggattgtagcttgttgctgcacctgagcttcccttccgcattcctgagacatcatggaatcatctgcatttgttacctctccatccctagcactcactggcatctggatatcctgatacactgcctgtatgttacaacatatatttcatttgctgaatgctaataaacttctgtgctcatgagggacctccagtcactaaagtgttttcttgttgtttgttctacaacagcattcatgtgatctatgggtgatggattttctcttaaaggaaaattgaaaaaaaacaaaaaacctcatggtattaagggagtcattctataggcaaaacaagccaaagctgaaacggaaattagaggaaacttccatatttcattcaacttgtgccatgtatcttagtcagtcttgtcacaccatctacactctaagacctgttcctgaagtttctgtacattttcagggactaatttgcacttctgcagtcagtcacaggatgtgctaaccctccaccaaaaaggagcacaatggaaaagatccctgggttcccttttcaaaccagaaaagagactaagtgaccccaggatctcatgaat

SEQ ID NO: 35987 - DNA, 2098 bp, Mus musculus
atccacctgcctctgcctccaagcaagcccagcctaaatgttggaaacactagggaagagcttggtgtcaggaaaacattgcaacaggctcatcttgaccaggttcaacatttccttaatcatctatatgaaacagtttctttaaaattctccatcaggcccggtgtggaggtatgtgccttttatctcaacactcagaaggaagaggcaattggagttatatgagtgtgagaccagcctgttctacatagtgagttctaggccactagggctacatagcaagatagaccttgttttaaatttttttctgtattggaatatgaaatattttggggatcgatatgttgatcaaagttagaactttttaaatcttctgcccatgtccctcttctcacctcaaagccatcttcacatctactaagtgaagatatcaatagggctcttgctcaaaataaggcaatttaccttgagaacagatgctggtggccttctgagtcaagattgctttgtagacatactttctttgccagggcatatattcataatatttttcacagtttctaagcttgggattggccctgtgcctttcccccaaaagagcagatttgattggtaaaatctaaccccttgtaagtaacttcataactttgcatggcaccagcactagaaccacccctcaaggacctcagatcagctctcttggatgactttggctacatcacgaagaagtgcatctcttgtggatctggataatgaaagtgaaaaaggccttccttaccccaaccacatcgtcataagagacacatgcccagattttaaccacttggcctcctaccaaagctgttctgggaaggtgaggctgaacttagcctggttgggtggcaggaagtaagcactcaatgcctttacaacaggaaaagccacacctcttgcctagtcaaggtagcttgagttgctgtttacatgtcgctgccatctacagcaggcactagagctgtccacagcctccatagcccactggagaagggctaccagcctgtttggaagaggaagaaggaatctaccctcacagttcaggaggacagcacagtgcaatatctctgaagggacctgctataacttggatatattttgctatgctttgaaacttcataccttagagtaggacctgaggcaaagtagaagtttgtggattgggtaacatcattgccttccaagtcctttcactgatctggctgctagcctagggacaaaatatttacaacctaaaatgggatagccaagatgtctacagaagcagactccttttgagtatctaaagcaaatactaactgcagcctagaaggggaaagaagatttggctgcggatatatggtaatggcaacatgattaccaatgggatatgtaaccaatctctaggtatctgtccaaacatggacaagtacttcctttgctggcaccaaatatgctacaaactaccagaagtgctgctattgtgttcaccctaaggctgtggccagatgaacctcctgactccattgcaggtccttggacaatgcatttggatgtgactttaagggaagatgtgctgacagaaggaggctagctttatgttgttacccagtactactatatagtgtcagctctgatcctgagaatttcttagtaacccagtccatagaggaccagtgactgtgggtatggaaagccacctagcaggcctcttccaaagccaggatgccaatttcttggtgctttagattctccaaggaagctctgccttggggatcatctggctttagcttagataccagaccacaagcctcgtggataatggtttcagtaaatgccagtgtccctcctcttagtgctatttcaaggagggaagtagctttccacactcagaatgttgggtgcatgatttcatcctgccaccagtggctttttcacctgcaccagtgccaccactgccttcagcccttaggctcacttgctagagggaggcatgggggtttaccagggatacttcaagtttacccatgtgtatgttgcatccaagttgtttttaatatatatatataaatatatatatcaaaag

SEQ ID NO: 35988 - DNA, 1098 bp, Mus musculus
atacagggcttgggatgcatccttattgcaggctgaacccctcttctctggtcccttgctgactaatgaaccactgatgagcagccaattttttgcactgactctcacccagagatgggaggcttgctagctattagcaatataaagttatggtacatagccttcctaaccccattcctttctagcacatcaaatgactataacctatttatcccagttagttatgtttagagtgggtcaagtagcatgtgtctcgctccctgttgctgtggactttggtatcacaactagatgatgtccttttaacctggcctgccatagtctagattgaagacaaaaacactaatcctcataagggggtgattaaatctgtccatattcaagcagaatacaaagatagatagcttatggaaaatgctgtgaggtcttgagctgtggaataataatatatctatcttgtttgtttcctaagcctgtggctgttgcaggcattttagaacttcccccttttcctgtccctgaaaaatttcatctcatcacaatgaatgtagtatcttaactgagttaaaggaagagaagccacctaaattgggcttgactatatagagcattgggtgttgtgagatgcaaaagaggaaaacagacagggtgatccatttatctaaacaccaagaagggatctcagactttggaacttgaagcaactcagattaggagggaaaacttttcccatcctttctcccaaaccaaaagtaaataaataaataaacccttggccgcccctttgtaaagtggttccaagcttgtctaagacaggatgccaaaggcatctcacctgttgtaggcacactaaaaagcttttatcttccagttagccaagttcttagcattttcaaaggaccaggcttcttgagaggaaagattgtaatgtacccttgctctgccaaactacagggctgatttgcatggcagttgcagtcctttctgaaatgaacagcaccctctcttctcttgcatccatgcaggtttctttttcttttttctatattttttttctggacaaggtcccacactgtagttctctctagcctggaactt

SEQ ID NO: 35989 - DNA, 1181 bp, Mus musculus
atgtgttcttggattcggttagcgagaattttattgagtatttttgcatcgatattcataagggaaattggtctgaagttctctatctttgttggatctttctgtggtttaggtatcagagtaattgtggcttcatagaatgagttgggtagagtaccttctacttctattttgttattttctctcttttctaattgaatcctgagacagtaagcacccataaaaaccaacctagcctgtgtacttgctcactagtatctatctctgtctttgtctctcttatctccttcagaccccactgtgatgcttcctgactgatcatgttataagtgtgcccggaatccaaaggcagcatatccagtggaagaattgtcttcatcatggagagtcaacaggatgaagctgttcaaaccaaaggagcatcaacttctagcgatgcccaagaccagggagctgaaaagggagccaagaataagacaactgaggcaacagaaggaccaacatcagagcctcccttatcaggcccaggtaggctgaagaaaactgccatgaaactctttggtggcaagaagggaatctgtactctgcctagtttctttgggggtggacgaagcaaaggttctgggaaagtcagctctaagaaaagtctaaacaagagtaagactcacgatggtctaagtgaagcgtctcagggacctgaagatgttgtcattgaagaaacagacctctctacacctttgtccaagtcatctgctcaatttcctagctcccagagtgccaatggagcgttggagataggctctaaacataagacatctgggactgaagccatagaaaaagctggagttgagaaggtaccctctgtgcacaagccgaagaaaagcctaaaaagcttctttagcagtatccgccgtcaccggaagggcaagacttctggggctgaccaaagtgtgccaggggccaaggaacttgagggggcaagaaccaggtctcatgagcatgtgagttcaatctctctgcccagctctgaggagatattccgagacactagaaaggaaaatgccaaaccccaggatgcccctggaccaaaaatgtctccagcacaagtacatttttcaccaactactgagaaggcagcttgtaaaaatccagaaaaactcacaaggacctgtgcctcagag

SEQ ID NO: 35990 - DNA, 1421 bp, Mus musculus
tgtgttatatccttcattcccaagttctatgggctccaagaacactgatctctacttaaatcttactggtaattgttccataccaatggaatattattgccttttggtcccatgagtttcagccatctgaaccattgcttaaaggaatctgattactgactttatttatcctatcttcctccaccaggcctgtttgtcatgtcaccaacagattcatcgaaatgcacctatatgccctctttgcaaagccaagagtcggtcacggaaccccaaaaagccaaaacggaagcaagatgaatgaagagaaggtggagggatagacctctgttggtcgtaaagcctctctttggtcagagtgatagatgttctgatttttttttaatatcccttccttatccctactgagtcttctatttaatttgctggaagaataacccctttctccttgctcttatttctttctgctcttggaagttgtggtttaagaccagctgtgctttgggtgctaatcactgggactcatgaccccttctctcctagtcacatttctcttactgccccagtttggaactgaatgagggggtaaaaggccctagttgatactttcttttgttcctgaggactggagtctaatgagctgtagggtgtaaagactggaggagctccatgccttgctttggaaaaaggcttcagtgatttccttccctctgtttttgccttgggttctgcagggacaactactttatttttgctgtacttcctaatgggctgatgcatatatctttctcaatattcaggtcatcattaaaatctaggggtaacttagacaagtgttccttttatataaaattgtgaggccctggtgttattctatagttccactcaagtcttccagttatactgaagttcttacataccagacagggcatcttcagaatcgcaagatctgtggatctttctccatacttgtattatttgcaaatcagtagacatttcctactgtgaaattagggaccaagacccatgccacaagagtcacctagttcactgcctaaaatactgggtcttattgctgtggtataggaattgtcttagactgaggaaccctaagtgaactttaactttgaattttgttcaaacccattacctgatcagtggtctatcattctgaggatagaaagggacatagtgttatatgaatgccaatcattttatacatgtaagtaggtaggacttttgcttttctattctttcctccttttgtcttttatgaggtagcgtcagttaaggacagttggtcactccttttctgtgggttatgtaggtgacctttcttccacaaataaaagacacttaagctctccatgccccacatctcattcctttatcaaaggtaagcctcctagtcatgtcttagatct

SEQ ID NO: 35991 - DNA, 1170 bp, Mus musculus
tttcagaggcaggtgtgaagttcagtgagcaagttcaaactccagagtgttgagctatgaggtaactttgagacactgacctttttcctactctgtccctctgtttgcttagagtcttcaaagccatgggacaggtcttgccagatgaagagcaggagaagctgctgcgagtctgttccatttatactcagaatggagagaatggcttggcaaaggcgattgaaggttcctcctcctcctccactggcaaagctccgtacacactggataccttacatgaggacctacaaccacctggtaccaactgtgagtccgaagaaagtattcaacagaaggagcaaggcaaccttaaggatgtcaagcaagaggagaaaaaggagaatgaggaagaggagaaggaggaggaggagatggaggaggaggaagaagaggaggaggaagaaaaggaggaggaagaggaagagcaggagcaggaagaacaccaggaggaagaacaggaggaggaggaggaggaagagaaccaaaaggtctttcaagatcagatggaggcagatgttgaggaaagtgatgatgtagaagaagaggaagaagtagatgatgaagaagaagatgaagatgatgactatgatgatgatgaagaagaagacaggatggaagtgggggccttctctcttgcacagggatccagtgtttttgagaatactaggaccacgtctcggaagagagaagcactgcagggttcagcatggcaagtaagctctggtaaggagtctttaacacccacttttattttcttccatcattgatttccctccattcttgatgggcccctcctctcctttctgtctccctctgcctctcctcctacctctcttgagatttagtgtcagtgtaatctcagacttgagatcctggggcctaagctttctgattgcataccccagtatccggacagctataactctttttgaaatgaagattgcctgaagatctcccgtctttcagcctcctgaattggtgaggttatagtttgatactactatgctctgctggccaacccttgaggctttccttcactctagagactatataagaaagaagtaagatgtgaacagtatatggcaagcctcagaggcaactggatacatgaatggcaactggctttcctct

SEQ ID NO: 35992 - DNA, 1212 bp, Mus musculus
gtgcaaccatgcctctctaaactaactgtttatttgccttagggatgctgtgctggatgcttttctagatgatggtttcctcattcctacgtttgagcagttggcagctttgcagatagagtatgaaggtagggtcctgggtgttcactgaaaccctagggttctgtgtttcttatgtgcgaactccagaagtaggctggagtgtggggtggggtggggctgaaatgtcagcccttttggctgaacagaataggtaatcctgctgatgtgtcctgggacttttctaggtggcgttgaatctgttaaggtgggttggaatgggtaggtggggtttcttaacactgttgttgtgccttgtcaaatatgatttagccactagctagagagctagaacagcagcattggaggggccttgagaggtcatctagtccaacatcctcatgttacagatggtcaaactgaggtccagaaaggggaagttactgaaccaaattcacacagtgagttattgacgaagctgaagtcagaaagagttctttcttttatacttggttttgtatcagttgttgtttgccagatactaactggtttctctttcccgctcttctgctctcctgctctcctgctctccttccctcttgttctgcaatggcaattcttgttgtttgaacttgggcgtgtctgttctctctctttggtgtgcaatttttttcttttcttctgcctacccctcttgctggcttgttttggtgctctctcattctcttgatcttggtcccattgcccttcccatccatcatcaactggtatccgtcacaaaccagaaaacatcgacttgaatgaagtgttggtgccaaagcccttctctcagttctggcagcccctgctcaggggcctgcactcccagaccttcacgcaggccctgctagagaggatgttctccgagttgtctaccgtggggagcactgggatccggcctacctacatccttagatggaccgttgaactgatcgtggccaacaccaagactggtgaggaaaactagccctagtcccgggggccaggcatcccaaggagaagcatctgccagtgtcctcagctcagccttttaaaagtttacagttgccaaagagtgctgcgggaattagaaaaatctcccttttcctttttcttctcaatgccacagaaaggaggcactctggatgctttgag

SEQ ID NO: 35993 - DNA, 1101 bp, Mus musculus
tgtggcctctcctcagagtggttattatatgagatagtcccaggaaggtattggcttgtttactagaaggaatgttggcaactctgggttcttgtttatgtctctagttaagtctcttagatttcatacttatcccaccataaacttgtatttccatccttttatacctaaaagaaaagatgaggactctgcgatgtcattctgacatcatcaggatatggcttagctttaacgtggccatccctagtcttgggcatgttggtgtggagcctacaactggaccatcaatctgctagtgtcagggcccctgaacagactccatcttgacttggggtctggaagcaacattgatctgtgtgttatcagcaagatcaagctggactttcttcgtccattctcagtgcccaacaagaaagggactaggcttggccggtacagatgtgagaaaggcactaccgctgtcctcaccgagaaagttacccctctggagattgaggtgctagaagagactgttcagacaatggatacttcgtgaatggtgctgtgggtggttggataactctagatgacttggggtgcataccatccctaccccggggtgcataccacccctaccccaaccccattctaccccaaccagaaaacatgcctttggcaattgctcaattaaaataaataaataaataaataaataaataaataaataaataaaagacaaaaaaaagtccccaagtccttgctgagttccttttctgccttctattcattcaaagggtgctgggcaatacagggccctttagcttcttcacaagacaaatgttggccccaaacatattggtatctatatctttgggctatgagctgtctgtatagtatgctttctgctttgtctttcttggagtattacaagtgagacttggtcttagatgttgatataatcctcactttctaaagattgggacagctgtgaagtttgacttgatgtcatcaatgattgtcaatacagtcaattataatgatgtaattcttccctagaaacctaaagggctaggttgggaagcttctagagagctaaacatgtggaagtacctgaagggacat

SEQ ID NO: 35994 - DNA, 1151 bp, Mus musculus
gcctgtatattcctgttgagtttggagatgcaacacattattagcattgtagttaatggtataaagaggatctggactgttttgtttttgttttttgttttgttttgttttgttttttaattccagcacttgggttgctgaggcagtaaagctaagagagtttgagtctagcctggtctacatagtgagtccaggacaggagagctgtatataatagagagaacccatatcaaacaaacagacaaacaaacaaacagaccctgcctcaaaccaaaaaaaaaaaaaaaaaaaagccatataggtgactaaagaggataattccattgttctgtttagtcatctgttcttggagttcttcctttaggaagttcgttatgcctgcttcagtgtgttcagttctaattttcagtatgaatccagcaatacttcagtgggctaacttctcatttgcatcaactctatagagagctaagtgagccttcctcccttcctgcctatacgttattgaccactcactgtctttctagagtcttggagcagcacaaactcaacaaggaccagtgggaagagaggatccaggtgtggcatgaggagcaccggggcatgctcaggtaagcctcccctgatagccatgagcttcaccgtccttgtaaggagaatgatgatggtgtctacaaagaagacaaattattaggtgaattggtggattttaagaaagagagactagggattattttgatatttaaatataaaaggcaaccttgaatcattgtaagactgtgatttattttaggcatttttttaaaattcttaagagcaaagttttgatgcaaaggactgtaacttgaaaagatcattaactataacatcaggactttatttctattatttttatttttatgccctctctgtcagtatctctctctctctctctctctctctgtgtgtgtgtgtgtgtgtgtgtgtgtgtgtgtgtatgtgtgtgtgtccacacgtcgtgcatacctctgctttatgccagggtgcacatgtggaggtcagaccaacttttgggagtctgtttttgtctactctaccatataggtcccagtatctgaactcaggttgtcaggcttgctggtctatgaccaactgacccaactttccagccc

SEQ ID NO: 35995 - DNA, 1133 bp, Mus musculus
gtaaagtctttaaaacaaaaagattgcttccttgaatagatagtgaggccagaaaaagtaaatacttattctagatctgcaataaaatctgagaggagggaacccagagctatggttgaaggcagacaaggttagccctagccaatatttggagcacaaaaccaaaacttgcctttctgtgaagctataagacagtgtgcaaagttagtaaatcatgttacatatggaaggtggagaaggagagcaaagccatctagttggttgcttgccttaccagcattcccttttaagccttgtgcgttcaaggtaaatgtactgagcatggaagcctatgtggaactatggtgtgatgactcggttatatgagagtgtggggaggctgaggcctgagagacttattccctggaacccctcaagattgcacgcagccttgctatcctgtttcacccctccttttcttctctagtgctctcctggaaaatgagaagaagaagcgtgagctggctgagaaagagaaggagaagattgagcgggagaaggaagagctgatggagaagctgaagcagattgaggagcagactaagaaggctcagcaaggtgaggcttgtgttcactgtgcaagttgaggctcttcagatcctcacctaaggtggacattctttttccccccggagctgcagaacaacactacatagtctaggtgtggtacagaataataatataaaaaatatcaagaaaaatccttagaaccctcacctactgcaccatgaagtggaaaattcccaggaagcaggttactgtgccatcttcatctctgagcccttcatcagtttcctgtttttctaccagagctggaagagcagacccgcagggccctagaacttgagcaggaacggaagcgtgcccagagtgaggccgaaaagctagccaaggagcgtcaagaagctgaagaagccaaagaggccctgctgcaggcttctcgggaccagaagaagacccaggaacagctggtaaagttgaatcctgggctgggttgtgtgcatgcatttttcttgcttgacccctataccctgcttactggtttataaatccctttgcctgcatacctgtgtctttctagtttgtatcccaaa

SEQ ID NO: 35996 - DNA, 2528 bp, Mus musculus
tcagagctggccaatgcccgagatgagtccaagaagactgccaatgacatgatccatgctgagaacatgcgactgggacgagacaaatacaagaccctgcgccagatccggcagggcaacaccaaacaacgcattgatgagtttgagtccatgtagtgggcgtccagccttcagggacccctcctccttcttccttgtccccacactcccatagttttgcctaactaacactgtgctggagccactaactagaaaagccttggagccatgccaaacgttcagtatagccatgggaccaaacttaatctccccactcataccctcgggcaaacaaatggcccactgtggtgccaatggaatctccttttccttctttgtcacactcattcaacctagctctctagaatagagcatttctccccgccccagctcagagacacgcattccttttggtttgacaagcaccccctccccatatacacttactgttgtcctctgggactcatgtgtgaagtaggttaacagctagctcccatcccttgccagtcctgtgatttgcaaagatggaatattgtgttgtttagggacagaaggagggaattggctttatcatttagtatgtcagatgacctaggatttagcctcttaattaagtctatcccttttacagttacttaggctttgtaccgattggaggataaaagagatgtttagccattcttatttcttctacctcccatattggacctattacaaatctagtcccagtgggccttgtctctgtgtttagggatttagtttctaatcaagatgggatgaagagataaaggaaatagtgcattcaagagattcactaacaacctagaaaggcccctgccccagcacatctttggagcctttcttctcttgagtgaggtctgtggtcagggctacccctgcccatgatagtccaggttcttggttccttttctaaatctgtccctaccctctccaatcctcagatctcttccagctaggacagagaggatgagtaccctcaaacctagccagttgcatctaaacttgttgccacaaaggaagaaacttttttgtacctggctttagtatttttcctgccaggacttctaaactacttcccccagagctaatttgaccactgttcctgtttcacagatacaaaatatgatgagtaagagtagcccttgtctgtcagtcacccagcaatcctccctcatcttacccagtgcaaagtggtgagtaggccctgcttctgacaaatctctaactcaggcctcatcactcattgtgctgtcccttggagatacagaaagctgctgggtattctggccttgtcccttcacacccccacacccttttctccactttggagcagctgctcccccttttttgtcacatgtgtgctcttttaatttttaccagtattatatattctagtgatatctaacaatattggtttctaccttttttgctaatgcactattagagatattagtcttgggaaaggatcattttagcttcattattttttactactgtcaccccacatctgagaagaatatactatattaaaaatgatattttgccaaaaacattatgtaagaagatttcagtattagcgacttacctgtcactataggtcatacaatacatttaaaatgtacttagtatttggttttattgttcctgtttgctttttccccagggttcagtccccaaaaggctgtcttgtccctctatgcagtatccttagtccagagcatccctcagcccatgccccttttacttaatcttggggaatcttatatgcattgctgtgaattatattgacagttggtgagctgtcttatattggctaaattcaaacctggaattgtgggggcaatctagctgcattaagggcaataacccacccccccatagaggctggggagaagggtaggatttatattgaggttttttttttgtgtatttttgttttttaaataattgttttggaggggtttatgctcaatctgtgttctatttcagtgccaataaaatttaggaagacttcactatgactcagtctttctgtatatctcactgtaatttctaatccataggctacctatcgttggtctcagtttaccttgacttaagtcctagtggaaggaggaatatgattgtccttgtttgaataggaaggaatgactttaaacaccacaaaaacaagagtaaccagaataagtcctaagactagaggtgtggtagaactgactgaggtattccttttttcttttctttttttctgattcatgtcatggcttctggtgtgggttggaggcagagaacaggggttaaagcagtggttctcaacctatgggtcatgacctatttggcaaacttatgtctccaaaaacctttacattatggttcttcacagaaacaaaaatacagttatgaagtaacagtgaaaaaatctttatggttgggtggtcaccacaacatgaggaactgtattaaagggt

SEQ ID NO: 35997 - DNA, 2600 bp, Mus musculus
ttatattaggttttcttgcctttagctcttaaacactgtttacaatattttttcttcttatttcttggttccctagactcatagcactctgtgagtctgctggaaggtttgatggatgttcatagagctgtgtttctgagttttagcataacacataaaggaattttgatatgggtctcctgggccttatctaatctttgaggttctgtattcctctaccccaagcaaaaagccaggctacagtttgatctttcaggaccctacagtacagtacgtttctgagtcaattttccctttcctatgtctgggctccccaagcaatcacccaccagacctccaaagatacccacagcatttttcaagttagctaagtgaggctgtgaagggtccctcaaggtatgagtatttcttttgacatgtcagttagatgcctactttactgtccgtttggttctttttgaaaattcattttgcctttagcttttacctgtacatctcaagagcagagacaaacaagaatctccttggagactctattattcctttttatctctgaatctttatgaagcttatgcagctagtttctatcctactagcaattggtaggttaggtaaaatgtagacttcctcaccaggacttatccttaagagagagtgctcgctacaagattctgttaaatgtgtctttaattacagctcatccacaaacactgattaagggccttaaggtcaaactgctgataagagtgttaaaacaacaagagaaaaaatactaaaaggtcccattgtacttggcaggggattagaagcaattgaatcacaacactgtaccagacaacctggtctcctgtaagcattatcaaatgtgtctgagccaaggtttagaccttggtctttggtactttttttctgggacagcttatgcttatctcaccaactttaattagccatatctatacttctggtgaagaagaactagcactaaatctgaggtggattcagcttgagtaggttccagctgtagaaaggtcactatgtgcttggcaatgcttcaatctcaagtccattactgcttcttagtgaaaaggactatgatgataaaacagcaaaaacaatgtgattaaatgacccaggcaccctgcttcactgtgcctatacataacaaggtcgttatacatccatgccaagaatcgccttggttccagttttcttgaacagttggagttaataactaaaataaggtgaagttttattttgctttgctttctttggtttcttgggtagaatcaaagaaaaggatgatgttttgttttttctttataattgatatttgaccttggcttacttcatatttgcatatttgatcaagtagtgtccttataaagtgggaccactttgagcactatgcttttatgtgtcttctctttgaagaattcatgagacatgtatataacataactctgggcctggacagcaattgtgttttacatatttgagctagcaacagaaaatatttgtgtacaggggatagaggtaggcgtttagtggaggtgagtcaggcctcagggttcactttatttcccccacttatatcactggaatattgaaaggttgtatgtagtatgggagatcaactttcttccctaaggtcgttaatattagagtaagtaaaaatgtcaacactacacctctcttcccaatagacctggcacagcctcatacccctcattcaatttattaccgacgtctttgatgttttgtatttaatgtaggcaggttttaattattgttttcctttaaatgaactatttatagagattttgttaaattttgagccatatgcatgagtggatactgacaagttgtgtctgatttatgataatctgcaaacaattcatattaatcaataaacagaagtacgtacaaatgccttgtttattcctcggctttcagtgaacttgtgtgactcattcaattgttttgtgtgtctgcttagtcagtacagaaagaaatgtgtttttaatcattgggtttagcaccagagctaaggcaattctgactcgtaacccaggagatctgagttgtagactgtgttctcctgcttacaaattgtttatgacatttagaatcttgtctgtctacagatctaccagatatgtttgtattctaaatttagaattcttttcttattttgttgattttttctgttgtcgttatttgtttgttgttgttgttgttgtggtggtggtggtggtggtggtggtggtggtggtggtggtggtggttgttttgagacagggtttctctgtgtaatagccctaagtgtcctggacttacttttgtagaccatgctgccctcaagctcacagagatctgcttgactctgactcccaagtgctgggattaaaagtgtgtgccaccacacccagctctaaatttataattcttagggaatgttgtatagtcttcatactgtgtgcatatatttagacctataaaccaatctcttgtgtttatatgtgcacatttccatttgatcttactatttttaaaaaagaaaacatatacacacatatgtatgcataccttcacattcaaac

SEQ ID NO: 35998 - DNA, 3480 bp, Mus musculus
tgttgaaaagagaccctgactcagtggctttctgcttcatgttgcaggagattcgttgcaatatgaggctgaaaagacagtggaggaggattctcttttccccgtaccacctggccaggagaccagtcctgaatttccagctaatgagggcatcttggagatcaaaccacttaactccatcctggatgatgactgcagctccactcgcggcttccccacccaggagtcctttaccatggcctcctgtgcctcagagagccattctcaatgggtccataccccaattgaatgtacagagctggacctgcaaaagttttccagctctatcccctctactggacctgaaaccttgagagagaacacagctgaacactcaggagacaggctggagctctatgtaccttttgaagttcccagcctttaattctaccaaggtgaactagaaaggtaggactaaaggactggaaggcatggactagcctcacaaaatttccaacctgggttctgttgttccatagggtttggactaaagaatagcaggaaactaggtccgatagaggttggagaagcactaaattttgagctaagtttacactgaacttctaggacaagaattgtctagagatcaggcaggttgacatgaggctaatatatttatcttgactctactagcaactagtcatattcaattttctcctttcaagtgtataagcagcacaacactgtagagatatgtggctccatattcagagaaataccagttcatgattagctttatacacttgtgcaaatcattttattctttcagagacatagtcttcagctcataagttttcttgaggaatgaatgaaagcatatacacatgtcctttatagtgcctacatggtaggccttttttttttccttttcctgtgctcactcagtcacaaattagaaattccttttatatcatctacatatcattctgaattttgtaacttcacccctctgtggtaggcaaataagaaatatatttttaaacaagcagcaattgagcaacagagatgaaaagtgatttgcttaaaatcacagaacaacccaatctcagaattagactagaacccaggattagcagtcccattatagaactcattcaactccatcactgaatttgaaatatatatgtatgtatctcaatatatgtgtcatacacatatgtggtatatgtatgtgtgtatatatacatacacatatataatggaatagttttgaggaaaaaaaaacacacataaaacctgaaagtttttcatgttatattcttaatataaactgtcatgtgtgatcaagtgtaaaaaattttcacttatgattttatgccaaatagttaaaatgttttttagcatttttggattttgaaacttttaattttggataaaggatgcccaatctatttcttcattaaaaattatgtagttcttgagttcacaagtgtaaaaagcataattgtatctcattcttacttatgggttctggttctgttctgactcctctgccttgcgcgagaactgaagataacatttgtctggaaaacactacttttttttttggtacatggtgcttataacaactcactatttgaaaaacaatatcttactagtttgaaataggagagatttgtcatttctatagccaggtgatatatttctgctattgtgtcctaaatctttgctggtctaatcattaacctttagagaaaaggaaaaggagggtggtgatgagcttgcatccctggattctaattgttctgctctttttctaggtctctttcactcttagcaaccttgccattgcttgttgctggactttcctgctcttcttttactcaacaaaagtagcaagagcctgggatgtgggtcccacaataaccagcgttcaaaaatggggtcttcagagccccattctaagagagaactaagtctccagtgactgaccttgaacactttttgttttattattctagtctggggatccagattccatagccatgggactgctgggcctgttctttctctttaattaattatagaagtggggggagtaacaatgaatgaggtggagtttgcctgcctgtatatgtttcatgcctatatttttgagaagtagacctaaaaaatggagtatacagtataaatattggcatctgcctaccatattgaagagaatgaaatactttcccttttagctattttctttgacccccccctacgtctacacacacataaacatgtacatggagtgaagggatattgaggaaggtatcatggggaggcctgaagcctggattttataactcatatcctagacttctgtaaaaatgatagttgtcaagccagtatatttcttagactcttcattcttagagacaggctatcagtactctctggtggggattcaaatcagtgtcttctagatttttctaaattgttgtttcttgaatgtctttgcatttttcttactccaatattcttaccttttcccccttccagtcaagtcctgactgtgatgtttctgaggtgcagaagtagtaccctgtggagctacagggaccatttggtgctttcttggcttagagaatagtcagtctatttctcttaagcctgaatcttcagttttacatgcgtctaagcatgaattgaaacatttttcttcttctttttttttttccagaatatgtcagacatgaccctcaggacttagatgtggctatcatgtgttggctttaagtatcctggtatgttcaaaatgagccactaggattgatgcccatttcgttatagtggttcaagttttgacagggcgaagtggtcaactgagtaaagcaactgaaccttttttgcttaggtgtaatatataatatcctggaggctagtgtgacttaggttattaaaaacaaattcaagatgcacacaattattctgggtcaaagaggtaaagatggactaaagctgtgggtgctgtactttatattattcacattatagttgttctctctgtgactcactatataaactttgatataggcagtgcaggggttgctcagtgaaataggggggcatacaaaagttagaatgctttcttcagtcatttcccttcatttgacacttaactaaggacatggctgcatacaagtattcctccaatatcaaggtggcagaagcaggagtaatgaaatttggaagcaagcttaccttacattgtaagactctttctcaaaaacacaaggtacaggaatttagatagtgttggaatacttgcatttggcatgaacaaggtcttatttttgatcctagcaaaaggaagaaaggtggagaaagggggaaaggagggaagtaaagaaggaaataaaacatttccaacaccaagaaatacaccagaccccatagtaggctaagtgctgctgaggctgtagtggagttttccattggaaaatatcacatgtg

SEQ ID NO: 35999 - DNA, 2306 bp, Mus musculus
attcccatctttcaaaggaagcaccacattgatttctatagtaagagagctaaaattatcttcacagaacatttactccaatctcttcagatgttccgttctcttgtgtacagaaagaatgggttggaggtaatagctgtagtattattgcactgatacaagatctgaagcaaaagtcagatagatctattttccagtggatattaaaacatttttatcatgacctagactaaaaagtcaattttcatcaatacctaacgtatactaacatgtgtgttacctgggaaagttttagttagaacagtaggtcctaactattctttaataccagatacttgctagcatatactatttgatatactgtaaacttgggctttcttatatgctttatgcctaataatgatcagttatcatgtatgacttgtgccatatgatgaaaccgaagtgtattatttcttggggagaaatgttctcttttacatgattttcctatcatgtaagcacagtatgaagcctttcttgaatgagatgccccattgtgggtaataatgtaggccccaatcctcattaagtctctaataggcagagtgtgagtaagaaataaactaaaatttggtgtttttttttccatagtgtaatcttgtttattttgattgatgcacttagctttacatcattttataccactattctatttagttacatttcagttttcagtgctggttacagctgataaatttatgtaatgacaagtttaatgaaacctgtagtttgaaaaatagtgtcttgctgggcgtggtggaacacgcctttaatcccagcacttgggaggcagaggcaggcaaatttctgagttcgaggccagcctggtctacagagtgagttacaggacagccaggactacacagagaaccctgtctcaaaaaaaaaaaaaaaaaaaaaaaaaaaaaaaaaaaaaaaaaaaaaagaaaagaaaaaaaaagaaagaaagaaagaaagaaagagaaaaatagtatcttacagtatattcacttaagtcataacagatcgtctccccaagctcttatgaaccccttctatatttcaggattgtggttatggagaaggtggagatgcacactgcatagtctgccctccccgaaagtataaaagcacttggggacatcacagatgtcagacatgcatcacttgtgctgtcatcaatcgggtccagaaggccaactgcacaaatacctctaatgctatctgtggagactgtctgcccaggtaagcctactaaactgcataagtcgttctgggaatttttaacattcttagatgccctttattatcctacctcttaaaccctagtaaaagtattctaaggatcagtttcatgctctagttaagctccatgaatggagaatctgtatctttctaactggatctatctatacaaagaatccaggaattttcgaacacctatgagcacctagaagctttttaatcacactgatattctgcctaaaatttaaaataaatgtcatgttatattacacaggaatcatgaagaagttggcatcatataactgtttgcctgtctcatgaccttagctcctctttgggccataggatatggataattaagagaaaagatggactgaatcacacttggcagagatctcatgagggttggcactcctgctaagaaaggactcatagacactccttatcatctcaggaagggctgttacaagtcaactgcttgttcatcactctgccattcctttctgctctgatcacaggttctaccgaaagacacgcattgggggcctgcaggaccaagaatgcatcccatgtacaaagcagactccttcttccgaggttcagtgtgtgtatctttttttctctcccttcttccccaaacctgtattagtcaacaaaatcagtaaacttctttatccttgtaggaggaaaacattccttggcactcattcctttggcatattaaacagaggcagccacgtatgattaaatgccaacttttcagcattcagattcattggacctgtttcccttttcttaaaaaaaaatgtttctaatgagaaaacatttgtattcatactttgtgagctgcctgactaggtttgatggattaatgaatgatacaatgtattttaaaaataacatttctacacttaattgctattagagtcaatattgctattagagtcaacatacatagcatatggaaatccttaactcttggactactatagaagctgaaaaaacagctagaattaatttctacctgtgtcactagacat

SEQ ID NO: 36000 - DNA, 1182 bp, Mus musculus
gtatgtgaaaatgcaacagaaaaaccaattaagctgtgattgaatagcttaatcatattttctgtatcaatacctgtcacccttatacactgaactaatggaacccataaacctaccatttctatgcaggattgttaatacagattctacctctatcagtactttctcctatcttttgttgctgccatctctacctccttttatattattctccatctatacataactaatcagagagagagagagagagagagagagagagagagagagagagagagagagacctagtatcataaattctcaactttcaacccaccccaatttggtttacactgtcaacatttgacattactcttgccaaggtcatcaagcaccttggtggcattaaattcattgctatttccagtgatgtttctgtttatcctttctgccatatttaatctaataatcaatctttccaagttttccaagttttcttagttttgtctgttgattgcttctgttctggtttataaaaatctgtactttctggacttcatataaacttcataaagcatctctgtctctctgtacctctttctgcctctctctctctctctgcctctctctatctcccttcgctccccttaatcattttcttcctccttctaattctctctctcacttgtatctttatcttctgagttccatgtctatctgtccaattacttacttgacatttttattccattgtctcttctacccctcaaatttagtgtattcaaaactgagcttttgctcctttctttatagtccaaatctactatgtttttacctttgtaaaaaattccaccagagaactctgataaacctgataaacagcttcggtgaagtagctggttataaaattaactcaaacaagtcaatgactttctctacacaaagaataaacaggctgagaaagaaattagggaaacaacacccttctcaatagtcacaaatatatataaaatatcttggcatgactctaactaaggaagtgaaagatctgtatgataagaacttcaagtctctgaagaaagaaattgaagaagatctcagaagatggaaagatctcccatgctcatggattggcaggatcaacattgtaaaaatggttaccttgccaaaagcaatctacagattcaatgcaatccccatcaa

SEQ ID NO: 36001 - DNA, 1236 bp, Mus musculus
gtttaccctgcttatgtgtgttggaacctaggaccttgtccatgcttagcaagtactgagatacacacttctgccctataactgaacttgtattattctctgaggagccactaataaaacggaacttttagtgtacttctataatctagattatgccaatgacattggaatttagtaaatattgtagttctgataataggaccatactaaatactcctttttgttttctttagcatctacagcattccttgctgacagccagcctccaaacagaaaagccctggcagtgtatcctgtctttttattctactttgtcatcagttggatgatactcacgttcacgccatgagtcaggatacacacattcaacaccaatgaactgaaggctcacctgaaagataatggttatcaacaacaacaacttctcccactcttgtacaattgttggggtattaaaagggggccacatgccactgttgtcatttatataagaaactgatatttgcaaggctgtccttttcctcttaatgttattcttttcaaatacttgtacatcccatagatagtaacatgcctccttaaggcatgatgaagctattcgtgtgacccagtgactcgagcaagtggatccactctacagattacagagttggtgaccatcttcagcttggagaagatttgttcaggtgcagctcttaaacacattgccttatgactattagaatatgcctcttttcataaataacagtctgtatccattgattttcttttctcccccaaactcgagaaggcaacagcaagaggttaggaacgaggtttgtagatgtgggaagagaaaacgtgttaactagtttcagattttgatcagaggtaccgctgtacttggtttgtcgtttgtttttaagcaaataacatctaaggaatccgcttttaaaatatttttgtatacttacttttctgtcacgtgtaacagaggctccgcttacattctagtttttaacctttcatacagtgacagcagtcaaacatgcaactctaactgaagtgcttgatggtttaatgcttgagctttcctaagtagtagaggatcagaaatcgaggtttatggtttgtagtgcatattgtcatgtgggtaccttcctttaaggtatagcttggctattgcgtatttaaaagaatctattttgtacaacccagcctcagattagaaagaaaggctacatcagaagcgtgcat

SEQ ID NO: 36002 - DNA, 2220 bp, Mus musculus
ccctaatatttgaaatttgtcataaaatatcatttctttcctgtatcgaaaattttaaactttcccttcaaatatcttccctaagttgtttcataatatgcccaagtaattataataacaaagtaaccatacttctcaaatttagtctttactggattttactcaggtgaaacatttcctctgaaattcctaaggccacaagccgtaagggttttggagggttaaacacgttggatataaggcagcttgatcctgtgtgtgttaatctgttgcccttgggtgatttgctgaatggtttttatatggcttaaaaggggaatttaggactgaggctgtagttcagtgatagagcattagccaggcatgcacagcactctaggttcaatcctgggcattgccaaaaaaaaaaggtggataaactggaggcctaatttctttttttctggaattaaatgatcagaggatataaatattttaatatatgcaaaaaatctgttgctttctatgacaaatgaagtcctgactctggaagttgtaatctagcttttcctggttcgctacaaaggcacatggttgactgtagaaatgaggcctggaagggcagaagcgcccagggaaggacctcctgttctaagatggtgcagtttcatgctgctggtgagtttgaagcttttttgcagactgcgcatggctattgtagccgactccgacgatcacctgctgcttccacatctcagaccatgacactgttttacatggcttagcaataggaagagtagagacttgatttaattgggcttcagattacaaaatctctagtgatgacaatgtctttgaatgttttatatgtttataatcagatattgaggtgtgtgtgtgtgtgtgtgtgtgtgtgtgtgtgtgtgtgtgtgtgtttggtttggcttcaaagttatgtaagttgaatttgatcttttcattgtgggatctttcttttcgttgggcaaagttacgtggcatgagactaatgataagctgttgactctcttttataaatagtaccctcaaaaatgtgattagaagactactaagcctatacttggagatataatctgctgacttactgcattttagctgcctgcttattcctggagatgaaaatgaaattttgttggttgatatttttgggtaccatcaagtcgtgttagtatggtttgaacactgaagtgatctttaactagactgttggtttctatgatggttggatggaagtaaataaatgtatgaatgttgatggatccatgtatgtaaattagaggtcctcctctagattctgtgtgcttttgttataaatatagaactgacagggacaataatttatgattattaataactaacagttattgggcatttactgtataccaatttactattctaattttaaaagaacttttgtaatgctttattaaagtccactttaccatgaaaattcatcctttcaaggtgtacaattcagcagtccttactatctttacggaattacgcaagcagcaccactatttaatttgagaatgtctgtatcactgtgcagagaaacaagccactcctgttctctctgcacctccagtccctgtggactaccagtctgctttctatccatcttggccaggtactattctcaatgcctggttcctccactcttcaacagaaagtgctacaattctcattttacagtagaaaatttaggcacagaaatgtaattgcccaagatcatgtattgatgcatgcaagtgaattgatggtaagaacacattagatgaaatgcagtttgtattacactcttaggcacatagaatgagcacattccttcccagagtatgccccctcttactcacctttgcatcctggaactgattggacgtagatatgtcttttttttttttccagagtaatgacctctggcatctgagcacacaaagcaggcagacttaaaaagacaggtttacggcccttactcctcattgacccccccccccgtttcctctcttcacacacacacaatcaatttttccttaagcttgaagagtcaaactactacttaaaaatcttccatttcacgtttaccacttagggtactgggtctatttctaagacttaagattaaagtcattcaagtactgaatgcctttctattcggatagatgtgatgagaataaagactttgccttaataaagcttgtt

SEQ ID NO: 36003 - DNA, 1326 bp, Mus musculus
aacccgtgccagagtctggagtacgcgccctcatgctcacttcccagtacctcatggaaccctgtggcctgggccgctctcgcctcactcatatttgccgcgctgacctcaggtaccaggcctgggatgcctgcctcacccccttggccctgagcccatccattgcacttaccctatgtcagtgatacccagtgtgggaaagacttcctttctctcttggacggaaaccccatttctcatatctgcctgcctcttcctccccaggggccgttctcctgactggtacaacaaagtctttgggcacttgtgtgccatggaagtggcaaagatccgagactctttcccaacccttcaggcagctggcccggaaacaaagctctgagtcttaggctgacattgccaggtgtctgccaccaaagaaatgagtgggaatatgaactgagaagcctttagagacacagccaggcctcggtggcccagctacctatcctcttgtatcctaatgctactctgcacacacacaagagaagagggcgtaggtatcctacctccacccaccttcatccccgatactgcattctgatctcacaagcgaagagaatcttgttagtggcaagaagatcattgctgtccatctgaccaagaagacgctgctgtatctggaggcccagcaggggaagaaggtggagagccttggacagcctgggctctctgccataccaagtaggcaggccatcttatttggtgctagggttcttttgagtttgaatatgaggtctgatcctgcctttggggccaacattgatcctgaatacaggtctggaacaccagatcgggtaagcacgggggacacaatgaccaccacaatccattttatatgtgaacatgatgctgaactttctgaagattgacagtggccctatgggcccttagtaggtaacatgacaaactgggataacttgggatctgaggttagaggacctttcttcctcaagcccaagaaaccaatgaaccatcctcccctactttgacccacactttatccattactctctagagttgtgggcagcctttggccactcatggccatagatacaagtgaaatagctcattcccatgacacaggccaggccaaagctgacagtggcagcaagaaatacaaatgtatcctcatgccttttgcctacagtggtggtctataagaacagtccttttggctggagaggtggcatagtggttaagagcagtggctgctcttccagaggacctaaaagttcaattcccagcaatcgcagggtggttcacaaccatctgtaatgagatctg

SEQ ID NO: 36004 - DNA, 1240 bp, Mus musculus
ccgctctcttctcccccacacccctgcccttgccagctgtgcccacctttgtatttagttttgtagtttcttggcttttataatcccctttttcttgccccctgggcttcggaggggggtgcttgtgcccccaatccccatgctcttgtgccttccccctctggccaggcctctgggctccgtgggggtgccctttctaggagggcagggttggacactgacggactgcaggcagggaggtagccccctggccctgccccctcctcatcccttcacccatccccaggactgctcgtccactatcatcactgtttttaatgcttttgtgttgattttttttaaagctgtcaactcattttcatctgtttttttttttttgagaaaaaaaaatgggaaaatgtacaaggcagccccttcccaggctttctgagcctggcctgacccagtctaagagggcctggggcaggatgtggccagccaggaaacataggatggcatttcttttatagactccttagtagttcaggggagtgggggagggtaggccagggctatttctgcccaccgaggagagaagagcgccaccctcctttttggaccctcatgagacaatgctgttcctagcagtggggtagtgactaccacccttctaccaaaaaaaaaaaaaaatcccttccttgtgggattcttgggcatctcctgcctccttcactctcacggtaattaatgtcttaattggctgttgcctggggaacaggagagctgctgcaggcagatgacctcatggggggtggagggaggtgaggtgcccaggtggctatttgccctgcagagctgggagttccccccaccaccaccaccctgttctctccttatctttggcatctttggttcaaggtggagatcttaagcgggtgtaaggccaggcggcctgctccttccctgggttctagtacaaagcacacacaccccccactcactcaatatggctcccactgtccccccaccccaccccccgccccgagtttggagctggggcctggaaagaggaagaggctgcttggggctgggccagcctgcagtgcactttgaccccagctccttggcagcacggctgctaacagactgccactcaactgtgcctcgcaggcactcccagggctgccatggaaggagctgggccttacaccacccacctccacactgcctcctggccagctgcccaccccggtgccaggtg

SEQ ID NO: 36005 - DNA, 1115 bp, Mus musculus
cagggagtagggacttgagtccaagtgcgtcaggcctggcctgggtccctacactccctcatcttgtcctagcccaggcctccatgaaggagagctggtggtgttaccccagagctctccagagatgagcctcccctaccccatcctgtgtccatccccagcctaccaaagagtattcatcccttcccatccctgaccttgtggcctattgtcccactgagggacagctagactcctcctcaccctttagcaggtccctttctctagccaccccttgcccttgctggacaaagttcagaggctggcaagaggactctgactggagataaagtgctgctgctaacccttgcccgaggaactcatttagtcaggctaaagggatgagtgagagatgaggcttgggagcctttggccttgcttgcactgacctgctggaagaaaaggaaggacacattgcctgggtatctaaaagccaatgcaagctgacaagaacaggagcccgattctttgtgggataggccaatggctttcagagaccaaaaggatgcatacaggaggacagtcctggagcagcattacagagaaacaggaggggaggggaaggaggagctgcaccctgccagctttgtgatggatggacgccctccctagcagacaagggttccttcattcaagggccactgttggatcccaaatcagcttcttgagcctacggagcccgtttctctgccagtttactcatatctcacagcctgtcctctgcctggaccctgtgtcctccatcttttggccctcagcacttcgggcccggccacataccccatccctagagtgctcttttcagctggggagggtacgaggtgctggatccttcccagatgtgcttctgtgtaagtgaaaggcaggggcatgggctccagagagatcccagtactgccttctgacgcctgcatcctcaggaggggataaaggactgggaagcaaagggggacaatatggtcccagggaatggacccttggagactcccatcctctcttccccctcaccaagtgcccaggagacccctggctcagaccagcccaaggccttgcccagtggcaggggaaaggggcac

SEQ ID NO: 36006 - DNA, 1151 bp, Mus musculus
ctaagtctgtggtgatctgacagggtgcatgggattatttcaatcttcttgtatctgttgaggcctgttttgtgaccaattatatggtcagttgtggagaaggtaccatgaggtactgagaagaaggtatattcttttgctttaggatgaactgttttataaatatctgttagataaatttggttaataacttctgttattttcactatgtctctgtttagtttctttttccatgatctttccattgctgagagttgggtgttgaagtctcccactattattgtatggggtgtgatgtttgctttgagttttattaaattccttttatgaatgtgggtgcccttgtatttggagcatagatgttcagaattgagaattcatcctggtagatttttcttttgaccagtatgaagtgtccttccttatcatttttgataacttttggtttaaagttgattttattcaatattagaatgaccactcgtgcttgtttcttggaaacacttgcttggaaaattgttttctagccttttactctgaggtagtgtctgtctttggcactgaggtgggtttcctgtatgcagcaaaatgggttctgtttaagtatccattctattagtccatgtctttttattgggtaattgagtccattgatgttaagagatattaaagaaaagtgatggttacttcttgttatttttgttgttagagcaggaattaagtttgtgttgctattttcttttaggtttgtttaaagactactttcttgctctttctacggtgtagtttcccaccttgttttggtgttttccatccgatatcctttgtaggggtgggtttgtggaaagatattgcttaaatttggttttatcatggaatatcttggtttctccatctatggtaattgagagttttgctgggtatagtagtatggggtggcacttctgttctcttagggtctatatgacatctgcccaggatcttttagctttcttagtctctggtgagaagtctggtgtaattctgataggtctgccttcatatgttacctgacctttttcccttactgcttttaatattttttcgttgtttagtgcatttggtgttttgattattatgtgatgggaggaatttcttttctagtctattct

SEQ ID NO: 36007 - DNA, 1151 bp, Mus musculus
gtatggctggagagatgaaatttatcatgatcacgactagccaaaacaacaggatctggaattaaggcctctcctattagagctctgttgatgcaatcattgcctgcagctaaaggtccaggaagaccagagtgagctcatatatgaccaatataatatggatgttttcaggcaagaatgatgttttgcaattgtgaaaacagagatcctactggcatattaaagttaaacatgccacaagtctccaataagggaatcgattgtgcaccatataaactatcagtaaaaatattaaaagtatcatgtacagactgaaaaacattcagtactgctgtcagttctgctaactgagctgagaggctcaggagtctctatgactacttgttgattattcataagatatccagctcatcctttagaggagccatcagtaaaaatcaaaggagcatcatacaaaggctgtaaagaagtcatattaggaaatatcacctcatgtacatttaaaaattttatcaacctatcttgaggatagtgattatctataattcctataaatcctatttgagcaagcaaccaatccgtactgtgctgattcagccaactatcttgatccatactataagactgaacaatgatatctggctctttgccaaaataagttagtgcctacttccatccaagtatgatcatctgagctactgcttcataatatcctcaaatgtatccatgttagaggagccctttgccacaacaatcctgtaggcatatgaatcatattaaaaattaacagatgtaaaggcaaagagtaatctatataagtgacaaattgttcttcaatagctctttctacttgttgtaaggccagcaatccttctgaggttaaagatctaggggaggtaggatcagaactccctttaagaatatcaaataaaggtttcaattcccctgtagtaagctttaaataggggtgaagccaattaatatcacctaacaatttttgaaaatcatttaaagtttttaagttgtccctgcgaataactatcttctgggggaaaacagcttgatttgtaagtctaaaccccaaataattataaggatcctgagtttgtatcttctcaggagctatttatagtcctttatcagctaaggcc

SEQ ID NO: 36008 - DNA, 1115 bp, Mus musculus
gtacttgtgtctcaaaattttagatgagcagaaatgtgaatacaatttcaatacacatattcatgcataaaattctaaaagaattaataaaaataattattttaaaaactatatattcgtgaaaagaagtctgaccttgttagttagcagtgtgccttaaaaaatccatactagttaacctgataaaacaaattaatgacttaggtggccattacaaatttagtatataaaaaaattcaagtgtgtgtgtgtgtgtgtgtgtgtgtgtacatgatgtacctatgtacgtgtagttacatatcacagtgtgtatgtggagatcagagcacagctttgtggagctatctttttccacctttatataggttctggggattaaattctggattccagacttgtgcagcaagtagatttactcatcaagcaatcttgttgaccctgttacacagcatttaaattaatttaaaatattttaaatcgttggaaattttgtaagttgattggtgttcccatcaccccactgggggttctgtctggctactgaaagcaatctcttcaggttccatatccccactgttgggcatttcagctaaggtcacctgcattgagtcctcggagcctccccatctcaggtctctggaatttcttagagattccctatacccctcccccagcagctgcctatttccactcattttcctgagcctttcagcttctcttctgtttctccctatacctgattctgcccaaccccattcctctctcctcatgtctcccaccctgatccctccctccctctggttcccatgactattttggttgcccttcttttttttttttttaattaccaactctttttttatttttaaggcattttctattagacattttaagtgggatttatgcatcctcacttggaccttccttcttgtttaactactttgattcttttggggtatatcatgcatatcctgtactttatggctaatatccacttatcagtgagtacataccatgaatgcccttttgggtctgagttaatcactcagaatgatattgctcctgtctaaaagaaatgccgggataaaaatggaccagagactgaaggaatggcc

SEQ ID NO: 36009 - DNA, 1135 bp, Mus musculus
gccatctggattcaaagacaatgtgtctggctacatctgctgatgatatgtgtctgtaggggcttacaaagcaatatgattttataaagatgaaaatgagatttttaagctgacatttgtcagtgtgagtaagggccaatgatggaagcagttccagaaagtggaaacaattgaagaaatggaactagtactgccttagagttaaggataaagggtgccaggggattgtgaaatcgtctaagatacttaacctttcacctgggaggctatagaagcatttctttagatgtgatgagtgtctcaatgagttaaaaggtagcaaagcaatccaactttccttttggaaagctattcatgttattttgctggctatggacagtgtttgtcaaatgcattctaaaaatatttactgagtaaacagatccaatttatatcacagtaggatagaaaaactagaagaagatctgtatttgtttagttaatgtttatattcttaccatgtagacaaggacatggtacatgacagacttcagtgaatatttctggttccccatggggacttcatttctagtgcagagataaacagaaaacaaaggttgtggtggtaagggctgtaaagaaagatacagcaaagaaacagtgaaaggggtaatggagtatactgaacagtgatggggtgggggtctttgtgaaaagggggtggctgaggacagccctgagtgaaatgaagggaaagcaaacggaagaaagcaaccaaaagttttttttttttaaaaaaccctctgaaacagagaatgcatgatatgtttcaggaaaatcagtgtgactgggatcataggaagagaaagaaaggagatgagggcagacagtaaaactcattctacagccttgtaagccaaaggaaaggtcctagtgtcttattctgcatggactggggaactatattagatgagtttgagtagatgaatgacagtatttgacttacattttaacagactccttctgacttctctaatgaaaaaacagggagactcaaagggggtaatatccaggcaagagatgataatagcttagaatagggtggaagcagtatagttagtaggaagtgctatgactctagaaagattttgaagga

SEQ ID NO: 36010 - DNA, 1122 bp, Mus musculus
gggcgaagcccctgcatcctagattctcccattccatcctggcccatgcccctgccccaggtttgggagccaggactcccagaacctctaagtgctgctgtgtgtggaatgaggtatactggcgttgcagccacaaagagaaatgccccatgctatttattccccagtgactccaggatgacaaggcctatgtgacttcccagaaagaccttgagttgccaggacagttgacggagccccagggttgtcaagaagcagaaccttcttaggctccctgctgactggcttatggtgactcctcaacccttaggtccctcatcagatgtatcatttgttgcactaaaatgaggatccaagacagtaggccacaaaaagaaaaggtgcactccagattctaggggtgatggggggcttcttctctcctggctgggggtgccattaggttgcaacttaaggagagggtcaggtcagaagaaggcaagtccttgtggcaaagacctgggcaataacctaccaagtcaatatccttgacagaagaggcattcttgctgcattgcactataacctactagaggctcaaagaaaacttcccactcaggctgagaggtatactgtggcagcttgctggactccagagctgggaactttgctttggcttggaatcatgcaggaatgaccacatgcatgcctatgtaagaagctatatttggggtcatgcatgtctcattgtgtttacagctatgttccactctcagaaaactacctggagtcttcccacctgtcaccacccaccccagtctgactagaaattctatcttctttctcctcggtgcctacctctgctttagacaggtgcttcacagtgtactctttaaattacttgggcacaaagaattttccatttattaggcatacaattcttctaattctaatcaaactgtgtctgggaacagatggttaaactggataacctccaaaagccccttagagtttgaagatcggtggcactcagcagttacctgccacagtaaattttggaattcccaaaccctacactcccttgggcatcagcacagtatagcttttctacctttcccagggagggggagaaagtggggatag

SEQ ID NO: 36011 - DNA, 1265 bp, Mus musculus
tctgactcccgagctagtgtcttaccacacacttaccacacactgtgtggaatttgggttccgaaagaaaaattaaaagtgatcacatggaactgatatcatggcagagtcctagggagaaacctagcaatgctatggtactgcctagtctcttggctgccacaggctctgtggaagaagtcttggatgttttctaatcctgagttgagctctgggacccacagaacttggagccttcatgacctttcacccatctgataaaagcagcaaccatcacacaacgagctgctatgtggggcaaggtcttctgtcttccattcctgaccctagctactagttctgggagccagtctgcttcctggggttaggtgtgactcctcctctcctcctgccatattacaaaggccttaatgttgccagaacatcttcctctgttgatgttgagaggttgccctcccgagaatggagggaaaacctaagagcaccattccaaagccacatggctatggagaaatagaggaagtttcctaactgtgcccctgcaggacatgccaaccccatcatatgctctgtgcttggagatcataggggaagtgggcttctcactaccctgtcttcatcctgaatcctcacaaggagccccagatgcagaaggctgggggaggaaataagaaagaatggggggcctgctgtgctgtactcattggcaaagtaatgaagcatttactgataggaaaatagggatatagatttacagtttggaattgtcatgatgtgaagttatcccaaggttagcatagagaatgggatggggacatgtttgtgtaagcagatgacatgttagaagaaaaattgcaccgcaggagcctctaccagctgcttgagcttcaaaagccaagctggcacaaaattgtacctgctagatgttatgtggctactggttccctggaagatgtatcattttgccttagttgcccctggacccatcctgagcctaatctctgcagcttagtaagaaaaggctaaggaccctagagatgagggctttggtcctcatgtgagtgattgcattttatgcgtcttctagtggatgcaaacagatgtagagaaatctttgacctagaaaggcttttagagggaatgcagcccaacctacatcccatcctgttactcatatgcaattgatgtccagacagggaaactggcccacctaggacagtgtgcaggcaggcccccacctccagactcagcaggagaaggaggca

SEQ ID NO: 36012 - DNA, 1702 bp, Mus musculus
tggaggaatggcaccgcgcctcttctagaactttccagcagacgcgaaggaactctgccctaggcgccatctttgtcacctctccggccgcggttcctctggaagaatagaagcagctccggctgctgggagaactgaaactgctacggcgtctcttagtaagagcagttgcttttcctttgctggtttgcatttatgtttgtttttcaagatttgtttaatgtctgtgtcctgcctcttttttgtttgtgtgtttggggcgggggttgttaggttgttttggtttgggaggcgttgggtattttttgttcgtttttccccccctctcagatttttttttttttttttttttggtgtggctcctttcatgtggcagggaacggcaggcagtctatacacaggataatacgtctttgggacacctaaggggctttaagattcaactctaacttcatttggcccttaggtaccattttcttaaagttttaattaatgttaggctgaaaatggaaattgtgggttttctcaatgtttacctgggctgaaataagtttagtagaatggttcaggttgtgggattttccctgcaaagtagagttggtgtggctgaaatgacttatacgtgtttttcagttagaaaaaaaaaatgccccagccggctggcttgctcttaagcaatgttaaaatgcctgggttatgaataagccttcaaggaataatttgcttgtttggttttatttttcattcaaacttgtgcaaccagccataaatgggttttagctgcccagatattttcttttttccttttttcttttctttttttttttttttttggagggggggggttggttcacagactttgttgattcaacagtgaacagcaaagaaaaacgttatcattccaggggcttcaacgtagtcgtgaaagccacccttggaagcccagatagtttctaagcactaacacaactgttttttttttttttttctaataggtaaatgtaactgttagatgcagaaattcagtttaaatgaaccagtacctgaagtaagctttatcttaaagatgtgaaagacctgaacttagtgacatggtttgttaatttttagagagaaaaatatatattaaaagtttttgtataaaggaaagcagagaacaatacagctcggtttctattagaaattccttgttctcttaaatgtggcattcaaaaggaagagcaagaatggaatggtttacaggtttaaaattcactactgtatgttagtgaacttacttaaatacattttaaaaatgcattgtcacttccaaatgatctcaaatagtatatgttagtttaaaaactttttggaaaacgtatgcaatgtgttaaaaataaaagcagcttttgaaatacctggtttgcatttcttgtgcagctgacttgggccacatgaagtttgtatcccagatggctttcagcaaagagctcctgaagaataggagcaggtttggtggggacagatgaggctctggatgagacacctgcagtcttggaggaggccaagaggaaaatgcttcccgggctggaatttaaagagggacttatacgacggatgccctgggttgatatttcacttagtgaaacacatgaaagggcttcttttaatattctctgctgtgttttaaaagtagccctgatggtggggggggtgcccaggg

SEQ ID NO: 36013 - DNA, 1164 bp, Mus musculus
gctgagatcattgaatcctaaaactagatagaggtgagtcagaagatctacctcaggaatgttttgcatgaaagaaaaaagatgaccagcttttcagcactttcataaggaagtcctggcatcagtggtaggtaaactatgaccaatttaaggttttggcattctttgaagatgcaacttcaaagtggaggacttacaggaagcactgtcactgagcatccagcacagtaggctctgatatggccacatgactaaaacatctcatcccaaaagatgataggtcttactgagatcaagataggtctaggctcatcttgctttgtagtctgggggattggctctggcttagagaacccattcatagatcatagactctacttccaaggtaggaattggcataaatagtgcctggacatctgcaaaggcagaccttactatagccttctttggaagaactctgtattgttacgttcatgggtaatgcttttctgtggaacagatacaagcagaagaaggaggtggagcataggttgtctgcactgaaatctgctgtggaaagtggtcaagcagatgatgagcgcgttcgggaatatcacctccttcaccttcggaggtggattgctgtcagcttagaagagcttgagagcattgaccaggaaataaagatcctgaaagaaaaagactctccaagagaggtaagccttgtccttgaccacatagcaatgggaagctgccacccgaagtttgaacattctgcaggaaagaaatcggatgaaaatccctagctgcttgtagtggtgacaattccagctgctcaggaggctaaggcagaaggatcacaagtataaggtctgtctgagatacaaaaaccaaagagctctaaacaaaaattatgaaacgctggaaaagaactcactggaaaagtagctcattgatggagaacttgtcgagcagggatagagcccctaatcattagcactgcaaatactaaagctttgtcaacctccataaaagcattgctcacgttagggtaagtggagaaaggctgatggtttgccagaatcattttctgattcatttcagcaaccttccctgctactttctaatctaaggcacttagttgggactggatggtgtcaaggaaatgctttttccttaaaatct

SEQ ID NO: 36014 - DNA, 1221 bp, Mus musculus
gatcatgagatagagcaaaggtagagaaaattggggtaggccaaagctataaacccctccacgcaaaaggcaaatactcaggcttggataaggaataattcacagatccagagcatcagaagggattcttacgtggacatgctggccagttgaatctttcctgagatgaggggaagaggaacactcagttatttaatccttttttttttagtgcactataatattccataatgatacacctagtgtaatataaattaactgcctgagataccacaccaacactcaatgcttcctttttttttttcctcttcttagggcaactcttcagttacacacttacccaaccattgcactacattctctttctctctttctctctttctctctttctctctctctctctctctctctctctctctctctctctctctctctctctctctctctctcattctctctctctctcatgtgtatgtgcatgagcgaatgcctgtgcatgtatccatgcatgcacaggtgcatgtgtgtgaaagctagaggaatgtccagtgtctttcttgattgctcctcatcttattttttaaccccttctatttatcctacttgctcatactccatctcttaaatacgttccttgggctgcattgatactgaacttcaacaggcacacagtcagttaactatatgaataaataaatgaatggatgaaatttctttttgtccctgtactggacttgaccctgaattgggatgcttttgacctccagctcagaaggaagaacaggggggaggtgggggaaagaagagggaaagctgtagaacagaaagggttgcgctcatactttcttggggggtggcagtagaagcctctgtggaggccgaaagccctctttgcccttactcatcatctctcttgtcactttccccaaacatttccatcctgtccccacgcttaaggtgctagggaagcatagagagggaaatgtctttctggtgctttccttcaaaacatagtaggcttggtcagagggatgagttgggggggggtgctgagttctagaagtctcttacatcagcctgaaaaatccattgcttgcatcagaaaagatgcccctctcctcctaaagaagatgctaaaggcaaaggaggtggacttagtatgggctagaagcagagagatttagaatattacctgagggaagagatgaagctcgcatcagc

SEQ ID NO: 36015 - DNA, 1156 bp, Mus musculus
atctccatatcctagctattttgaaatcaacagcaatgaacgtggttgagcgggtatcttcagggtaggatgccaggtcctctgagcatatgccaataaacagtatagctgggtcatatggttgctttatttttagcctcttgagaattctccatgctaatttccagagtggctgcatcagtttgcaattctaccaacaaggaatgagagagttcccttttccctgccctccagcatttgctgagtgttggtcttttgccattttgactggggtaaggtgaaatgtcaaccttgttttgatttgcatttccctaattgttagggacaatgaacattttcgagctatttcttaagcatattttttcaggtcccaagctgaatgggtcatttttgtttgattgattggtttttttttggggggggttgttttacttttttttagttctttgtatattctggatattaattctctgtcagatgtatagctggcaatgatcttcttctatttgtgggtatcttctccacacagctaactcctggcctcaccttacaaggaccaaaaacattccttgaactgggcaggcagaaatactgtaacaatggttttctgtacctgaacctgtaccacctgacatcacacctgtgcgctcctccagtagcaactagtgacagttgtcatcatagccaagtctgagagtggccacacccttttggcttcctctctggggtttttcacagtgtaagcatcaggtactgctaggccaaaaggtaattacaagagtaagtgatcagatggggaccagggtagctgaggtcagacagaaaaagcaagtgactcggaggggcaaagtacaagaaacctaatcaagcttgtaagtaaggggggaggggtacaggtgcctgaagcagagagatcattctctggagttccagtactctctgaaaggaaaaaaatagctcggagatcacaccagccatgtctggacaaaatgatttattagagtgttgcagtgggggcttccacacagaattatcagagataggctatcggatcctcttaactctgtctgctgttggagctttctagctctgtgtctggctgttgtgctgcataaactcttcgatgactatgtcctccgagctttcaggagcagca

SEQ ID NO: 36016 - DNA, 1224 bp, Mus musculus
tgtaacacatctaagactgggaataagatttcggggattgctgtatcttgcagagagtgtaccacccagactacaacaatgagttgacccagtttctgccccgaattgttacactgaagaagcctcctggtgctcaggtaaacttataggggctcttattccagtaacgtttggtccatgccagaaattggccatggttggggtgtggatgtggattgggaggtaggtgaccagaaaagcagaggtggcacttctacagcatctccttttcttctgagtacatagatgtccctgttcttatgtctctgctgagtctgcatcctgtgtccttttgtctttcagttgggatttaacatccgaggaggaaaggcctcgcagctaggcatcttcatctccaaggtctgtgtgaatgtgtgtgtatgataggctgtatggctagctactttgttatcatattaaagtgcactggtggcccagcagataaaaaaatggatgacccgctggagtcataggatagacataatggaaattcagcctttccctttgagaactgtacttggggccagtatgctggggcatgtgggcatgtcagtactctgagaactcgagaggcagaagggggaagattaggagtaggtaacaatctataaagtcaaggcagacaatggtgacataggaccttagtcccagcacatgggaggcagagataggcagatctctgtgaatccaaggccagtctggtctacggagtgagttccagggcagccagggctacaaaagaaaaaccctgtctttaattaagaaaaaaaaaaaagaatctcaaaaaaacaaactgagaaccaaatttcactagcaagccacttaatctcccggcggtatcaccaaaaataacacatttgaagagcactgaatttgccctgcagtctcctgatttactccatcacaactacataatacctcttcactaacaggtgattccagactcggatgcacatcgagcaggacttcaagaaggggaccaagttctagctgtgaatgatgtggatttccaagatattgagcacagcaaagtaagcatagcacatggactatagtcatgcacgaagccatctcaggtaggacaggttggacccgaatagccttatctgtatgaaagcatctcttcaagggaaatgtaccagaagagagcagctatcagtgagctagatggggcgcattccattg

SEQ ID NO: 36017 - DNA, 1109 bp, Mus musculus
actgatcaggtccctgacatgggcttctaggctgctaagactatcagctggacagatttgctcagagaccacaagtaaaatggcttctgccttccatctgcctttctgggctcctaggaccaccttaccttctggctgggttacatagtcaggaaaggaattgtcccaaatgccttgggaactcctatgactacagcattgaagccatagttcaaatctcacacgctctgggaacactggtctttgagtctcatgttcaggagcatccctgtagcaagtatcctgtggctccatgcagctcttgctgccttccctaggactgctgtcagctcatttgggaaccataggaacccaacaccaagtgtcttggggactttttttaggaaggcctcatcattgccaggtcacatgggggtttacccatgagcagagatgaggctcagtattgctcttaaaggatgctgggactttagctcaggcatgcaccagtttcctggatgcttcttagagatgtgatgtaggtaaataaatggacctttaaaggggcatcattaggctatagttttggaagttgggcctaagggtctggactcaggtaaagtgactctgcaggtgtgtttcaaccagctggagcttctcttgattcttctcagaacaagggggctattgaatataactattacctataacaagtaactccctagagcttggggtggtttggtggagactcgacttatgggcctagccccataattgggcaatatttcactgaatgaaaacagcccagcccaaggctgctgaatggctccttagccttcttgccaacagaaagtgagcctgttttgtggtgggcgtggggtgtggtgaatgctgtacacagtcatcagatcataaagtgctgacgtgtttccctttttgcagaaggacaagaggatgctattttgtcatatgagccagtgacacgacaagaaagtaagcccccttctgagagtcttgcctttgtgctagtctcccggtcatggggcttagtaaagaggatagcttggggagcagggaaggaggaggaggcacatccagcccctggctcatccctagcatcactggatgga

SEQ ID NO: 36018 - DNA, 2073 bp, Mus musculus
aggtgcaaatccatcagagttgttgttctcataaacacccagcagaagcgaagagaagagaggaggactgatggaaagacagactctggacaactgcacagcttgtgaagtgagcgaaacagcccacgtgaggaggcgctcccgggcattcctaccctgtactgcggcttgcagctctgaacggtgcaacgtaacggctacagaaaggatcttatttatatatagatatatatatgtaatttatataaaatatatagaaattattatatatatatattatacactcttctataatatatatatatatattcacatacattgggactagaaaatctatggagacgtccatcaacggtactatgttattagagaaatgctttaattttcatattccaatcagatgacatcttttgttccacctggttgggaaggggttgacaacagtagtaagtgctataccaaagcactcgaatttggtcattctcttcagagctaaggcttgctccaggtggggccaacctacagcataagagaaggggctttggctgggagctggagattggagacgtgactaaagcagttgctgcccctgcagggcagtcgttcctgtgcagaaagagagaatgaatggctaatgatgctccggatgaaattgcctattgttttatgccgcctgatgtgtctgcatgagaggtttcctttttgttcatttttaagctgctgttaaaccaaaaccatgttgtgctactgtgtcagccttttcattattccagattttacttttactatttaagtgaatgcgtagaatcctatttgccagtgttctaaaggcttgtgaggttctgaaggagccaggcctgggatacagcggtaacttaggcctggccatccagtcaacagagggaaagcaggggctggtgagggcagagagtacaagctggggctcggagttaccatgctggacttagctaggggttccttcacggggccactgacaggcatagggaggtgcttgccttctggctcggtgctgggacagtggaagagcaccaggcttggccagccgtgtagtgagttggatttggattcttttcttttgcaactgctccatttgccctaccccagccccctcaccaacagctggtagcttactgtttcttcaagaagaaagtagactttaacgctgtaaatttgagctgtagagctaagactcgcttactggtgagctgtgaaatcttgttgcttttttcccagagtctgatggcagtgactggtccaggtagtttccctcccgcagccagtgcaggcagcaggtgtggtccaggccctaccccaccccactatgctcctttgaagccaacgtgcctccctcacctccacactggagggatgacgcaggggagaacatagaattgcttggccctcaactgggttaggaccatcgcaggtgatgcagggttgacactttaaagcactaccagccacattcaggaactctgttcacaggtatcctaccagcataatgaggctaactgtgactcgtggggcccagagttagaagaaagaaaaggcagcagctttctcttgggcagtacactggattgaaggcaaagagggataaagtgacagatgattgtgactctcgcgagggggggtgagcgggaagtgttgattctctgatggtaactgacagcagtggacagtgctcaatcctccctcccagggaagaaaagcaaagattcgaagtaagcatgataatagttggtttaccagtgttccttccaaggagacatatattttttaataaatgatagttgcaatgaacaatggctcagaggtcttcttgaagtagtcgagtagggtggttggggcccaacagcaggaagaattcagaccaatggttcctaatgcgggggggggggggctgggggaggggtggctgaccgggcagtccatgagaagggtgtgggcgtgggtggtgctagatcctttgctaaaagtgtctacagaggcttctaccctggcctagaagctgcccttagcactctctgctgggcaggggccgtgaccttg

SEQ ID NO: 36019 - DNA, 1275 bp, Mus musculus
tattctctcacattctggatttgaagagtctaataatataagtgataaatgagtggctgctgaaatccagagtgtgagtagggcttgaacttgacctgttctgcccccagtagggtaaggatctctttgtaggtcattgagttgtataaagatttatctttgttttgcaggtgcctgctgttcctctactcccactggtgagcatctttgtgaatgtttacctgatgatgcaaatgacagctggcacttgggcccgatttgggatctggatgctgattggtaggtgtctgctttgaagagtaagcctcttaggtgacctatcctgactcctctccctctggatctccagttgtaaacctcaccttacagttgtctatctctactaggatttgctatctactttggctatgggatccaacacagtatgaaagaagttaagaatcatcaaactctacccaaaacaagggcccaaactatagaccttgatctcacaacttcctgtgttcacagcatttgacctaaccatacctaattgttgtcttgttctcctatacaataatggagagtactcttgaccccacgaagagctgggcctctcatgtggtgttagtgacggatatgaaataatgctctgtatttcttgtgaaatgatggctatgtctttgctgtttctcatttgtttttaacttgtatactttgaaatagtctctgtagttgtttcctggctttgaaaaaaatgttattaaaggaaaattgtaaaaaaaaaaccaaaaaacctgtcctgttctttgcttactagagattatataaagcttagctttaagactgggaaagattcagagaagtgtcttgtgtctttttctctagccgtcacaaaattttctgctgttcctgggtatatgccttctggacagggtttggagaggatagtaaagactgcctaggtacaaacacctttaaaaactattcatttacctatttatttaacaaatatgtaaaattttagaccttgtgctgagagccagtgacacaaacagtaaacctttgctctagtctcacagtctagtgaggggaacaagcaggtaaacacgaatataaaatgatgagttgattcagggcaggatgagagatgaggaagcacaaaggaccacatttgacctgagtgcttaagcagtagactgaaaggagggtatgattgccagtgaacagtacaggaaacaaccgaattaggataaaacagattctctgtgacctgactgcagttgtggtgtagct

SEQ ID NO: 36020 - DNA, 1134 bp, Mus musculus
caggagagtgctgcatactggcttgttccttgtggctaacttctccactcagcttccttttttatatacaccatgattacccgcccagggatggcaccacccacagtgggctggaccctccacatcacccattaattaagaaaagtgccctctagacttgccaacagtccagcctcacggaagttatctctaacttgtgttaagttgacttaaaattagccagtgcagttgaccatttgttaatttgacacacaaacacatcactattcaagtagaaccatacctttcttgtttgtctccaagatctcatattacttgggaggcagaggcaggcagatttctgagtttgaggccagcctggtttacagagtgagttccaggacagccagggctacacagagaaaccctgtcttgaacccccccccaaaaaaatctcatattagtatcaatatcacaaaagaagaagacactccaacttttaaaagtcccctagtttttaaaaattaaaacatgctaaaatttcagtctctttaaaacatctgaagtatctttcaaagtttctctgaaatatcccaaaatctctagaaaatgacagtgtctctctaaaattccaaagtttcttaactgtgggatcctatatttatatataagaaaagaagttgcatactttcatattaagagcccagaagagggctggtgagatggctcagtgggtaagagcacccgactgctcttccgaaggtccggagttcaaatcccagcaaccacatggtggctcacagccatctgtaacaagatctgatgccctcttctggagtgtctgaagacagctacagtgtacttacatataataaataaatctttaaaaaaaaaaaaaaaaaaaaaagagcccagaagaatcagaaagaacataatcacagccgagtcaaagcaaaacaaaaatttaatatatagagttctgtgcttgagatcagggtcccactcaaaatttctgctcctcaaaagggtctgtgctacttctccagctcctcagcttgtcccctagggttagtcctgctctactttacagctgctgctgaccttggtggtcatcccatggtactggcatctctaaaatgctggggtctctgatgt

SEQ ID NO: 36021 - DNA, 1064 bp, Mus musculus
gtggctgaatacatttttttgtggaaagatttaatactttaaccacaggctgccgagcaaagctttatagcaatagatacttttgggcctgagactgagggagtgaataggagtatcttggattttaaagggcagaaggggagtgttttagggagactagtcaaccatctgaaagcctatttattctacacgatttttggatcattccttttatttttgttaactttcttatatccctttgggccttctcctaccttccccacctttcccactgccagtcagcatccactgttgtatcccttgccaggtatttgcatcgtttatcctggaaagctgattgcattgtagataggtttccatactccaagtctccttctaaattctttctactttagctgaaacttggtttctatcactgtgataaaataccaagaacaaaagcaacttgaggaggaaagggtttgtttagtcttgttcttcctgaagggaagttagggaaggaactcaccgtaggaactgaaagagaccttggaggaactgctgctcactggcttgctccctatggttagcctgctttttttttttttaactcagaatcacctgtcctggtatggttctacctggcctaggccttcccacaccaatcactaattgagaaaatgtctcatagacttgcctataggccggtttagtgggggcactttctcaattgagcttatctcttctcagatttctaggtatgtgtcaagttgataaaagccaaccagcactgctggcttctcccaaagagttatactttccctattgctatggcgcttttcagatagggggtctcactaggttgccttaactgatctctgatctcaaacttgtgagctcactcctcctgcctcagtcttccaagtagccaggaatacaggtgtgtggcacaagaataatgtacataactggtttcttttctaatacacattaggtggttttcagcattttagtttataaacaatgccacattgagtatctcaataaatgttatgtttttgttatgtaaatatgcttataggata

SEQ ID NO: 36022 - DNA, 1884 bp, Mus musculus
gtatcacgtgtgtatgttttcagaattgacctttggtattgggtaactcattggtatgcttttccttggggaagattgtttcttctgctcccagaattcctcagttgcctgtagttctttgtgtagggttgagacctcgtggtctcccctctacctccacattatgggtggagtttctgccattactaggagatacaatctcatagtaacccccaccccatactctttctggcttttaaaatctttcctcctccattgtttgcagtgttccctgagccttaagtgccaggagtattttggagatggatccattaggcctgggctccacaactgtattttgattggatgtgtttttctgtaatggtttttattataaagagaagtttccttggtaaggggtaaagactacacttatctgccctctccttttgagatatggtttctcattggtctagaactcaaccaattaatctagattggctggctagtaggttccagaatcctcctgtttccacttccgcagcactgggattacaagtgtgcatcactatgtctggcttttttggcaggtcctcattgcttgcaaggccaatacgtacattactgactgaagtatcttcccagattccccctcccccctcccgccccccgctccccaaccccgctttgggggctattgcaactctactacaaggcgatagagaaaagaattgatgaagcccagtctgaccttggattcactatgtagttaccttccaagtactagggttcatggtatatgccagcacacctgatttatgtattcctgggtattcctgggtgttagacctgtcctcacgctcactttgtgcttataaaaacattctaccaactgaactatatccctagtcctgaggaaaagcatttaaaaactcattttgaagcagaatcttactgtgtagccctagtgtctcagaaatcaccatgtagagcaggagggtcttgaattcagcgaagtgtgtcggcctgtgcgtctgtagtgctggaattagaggtgtgtgctaccacatatgactgaacactttttaaatatttgtattccttgagaatttcatacatgtatagaatgtattttgatcatagccaccattcactcccctttctagctcatcctggatctccctccacagtcaccttccaaatccttatccgcttttaaaaaaataacccacggagtccaatgaatgctgctcatatgtgtatgggtgtagggctatccactacagcatgggaacctattgaaggccatctatctgaaaaaaaaaagactctccctatctcaccccctaccccaaagtctactaactcctcaggtagggatgaggcgttgtgagcccctccccaacccatgctggaatggtgactgtcttgatcatgtgcaagtcctacaggcagtcacatctgctgtgagcttatgtgtgcaatggccctgtcatgtccagaagacactgattcatagtagtctttcttaatttctgtctcctacagtctttcagcttcctctttccagtgttccctgaggggtgtgtgtgtgtgtctatgtgtgtggctgagcactccatagtcactttttctctagactttgaccagtgtcggcattaacttgctgtccacagcaaaaagaaaaaattgatgatgatttagaactgcagtaatctataggtataaagaaggcagtgtgatatgtgtatttagcaaaatagtagctttccctgctagggcctatgacctcttcttgactaggttttatagtataaacctgaatttattcccatggagaaggccttagatccaattagcttgagaactgttttgtagtactgtggatcaaatatttatgcaata

SEQ ID NO: 36023 - DNA, 1198 bp, Mus musculus
ccctgcctctatgagggtgctcccccctcacctactcctatcctcccgctctggcattcccctacaatggggcattgaacaccctcaggcctgaaggccactcctccaactgatgtccaacaaggccatcctctaccacatacgtgggcagcaccatgggtccttccatgtgtattctttggttggtggtccagtccccaggagctccaggaggtctagccaattgacattgttgctccctccatggagctacaaacaagtcccttctccaactcctccatcagggacccggagctcagtccagtggttggctgtgagcttcctcctctgtatttgtcaggctctggcagagcctcaaggagacagctcaatacatttttcatctttctacttcaaactcaataacacttccattacccctagcagttaccatcctttctgcctctttgaatttaacaatcacaagtatatcatataagtggaatgtttcttccatttttgttattacacgtttatttctatgtatgtgcacttataagtgctacagcacatgtgttggggattgagggagccttggaaaaatcagttctctccttctaccatataggtcttggaattaaactcggtgtcagggttggtggcaagtaccaccctgggccatctcactcactcttatttgtctttttatgactggcttctttcaccttagcataaaatcgagggtcatccgtgtacagtgcatgtcaggatgcctttccttctaaaggctagataattttccattcatttccccattccattttgttcattcctctactggaacttgaggttttcccatctaattaaaaattttaattatgtttgtttatttgtgggtgtgtgtatacatgcatgtgcatgctattgtgtgtgtatgtaggttagagaacagcttgaagaagttggttctcaggttctagtatgtggcttctggggattgaactcacattggcaggcttggcagcaagcacctttaacctgctaagccatcttaccagcccccattttaaaaaaatgtatgcatgtgtcattatgtgtttgtagggggtgggcagagaacaaccttaggtgtcatccttgggaactccattcctccaccttttaaacatgctcaataaataaatatattcccttgagacttctgcctaacacatgttta

SEQ ID NO: 36024 - DNA, 1222 bp, Mus musculus
tcactgccaggtgactttctgaatggtgggagggggtcatgttttaggttcctcttgatggtaaggaagagcaacatcattttcctccttccattcctcctttcccatgtcatttagtactgccccaagggcagaagcacgcacgcacgcgcgcgcacacacacacacacacacacacacacacacacacacacacacacacacacacacacacacacaccactttctcatttctcctaagcacttttgagctgttgaatggggctcaggagcaagagttgtctgctgccttccccagcttggtcacagggttattgaactgcctgtacttgtttcctgttgaactccagtgttgtccccagaaattgaaataggctagcagctaggtgtagatttcccaaatcttagaggctaaagtagcttcttgaggctggcaaatgtcctacgctgttgtttgggaggtggtggtttgtttgctggggcctgctgtctgtccaagtggtgggatgagaacaagttaactctggtaccagttgtaagttgggactcttggcttagactccctgtcatggaaggatttgtgttttttctataggtccttggggaaaaggattgctgagtctggtgtgaccctggtcagagagatcaggattagattttgacaggggacttggaacccacctcagtgttgaagatccttgagatagattagctctctagctgctgagcccatgctggtagctgagtagcccctttcccacctcgccagtgtcggtgtccttgctgccttttgatttttatcctctgttacagattttttttttaaagatttctcctttcattgtgcacaagtgctgagactctgaggctccatttcttctgtgtatatatcctgacttggggcttttattcagcaaattgttcattcttctgtcagacaatgtcatattcaactctgttcatattaaaccactgtgaagcaagcctccgtttttctccttaagtgtaaatgtattatttcctagtgctgagtacatgctggatattgtgtagaactcatctaacatggccattgtcctggggtgatgagtaagctttgagtttatattacattacagaacagcagaatctagactgcttatagtagtttacctatggtttcttgtaacttacaactgactttgtcacatagataatgcatctccttccagaaagtagccat

SEQ ID NO: 36025 - DNA, 1230 bp, Mus musculus
gatttaccactataatgtacattataacacgactgagagttgtctctgtaagataaattttaagtagcaaaagattttatttgtgcatttgtggggaggaaccaagagccttgagcatgttggtaagtgctctactactgagcagccccagcaagggacttctgatccccaattgtgatatgattgggtatggtgagggttaatattcacctggtagtgtgttttggaagaattttagctatgtagtctataggagcactttttcttttttttgctgggagtcaaaaccaggtgtttatacagactagggaagtctcctcccactgagacatatcctcagtcccataggaactactgcttctgacaggtgatccccacaggttgaacagaacttcttgcctattttcagtttggttatttttttacttttgagatggggtctcaccatgtaggcccagctgatctggaattccctagatggtgtaggttggtcctacactgactgctgatcctcctgactcagcctcctaagtgttaaaattacatgccacagcacttggcttcttttcattcttccttccctgtagacaaacctacccatcttcaagctgaaagaatcctgtgtacggcgacgctatagtgactttgagtggctgaaaaatgagctggagcgagatagtaaggtacagctcatctcctaattagtaccattggaggaggagatctctataggtttgggtgtaagatcacagcctgtaaagatcttgaattggataataagggggaacgcattcttatggactcattcccaatatattggttctggggggggggataccctttgaaacttgaaagagataagtttaggacttattatttataaaattgtgtgtgtgtttgcttgcctgtgtgtgtattatatggtgtgaggtcacacacaggccagaagagcaggttatgtatcctgcctgctctagctctctgcttcataccttttagacagggtttctcactgaatctggagctaggccagcaatctctagtgattctcctgtctctgccttcaactcccagctggacttttgtttgtgtcctggagtccacattcaagttctcatgcgtgtgcagccaatgcttttaccagatgagccctttcctcagccccatgaacaatattttcaactattattttgttttttgtaaagttagtaagcatttataagtgcaaaa

SEQ ID NO: 36026 - DNA, 1130 bp, Mus musculus
aagtgaggcatggctggacagggtgtggacgatggacaaagattagtgaggaatccaagtagactagaacatgattgacaggacgggaggggaggatggaagaaggctgggggatggaaagccaaggcgatgtatcgctgggttctataactaaactaggttatgggaagccattctaaaggggggagggcaggagggctcagcttcttcctaataagatctctctgggatgatggagttaagcaaaacctttagttcaaggcaagagtgagtgaaggaaagggagacagtgggcttatgggagcagtagaaaagcaatttgcagacagaatgctttgctgacttgtgtaagattgacatctgcaagagagaactgttttatgcttaagtttcttaggtaccacaatgtcatgtctcacgtgaaacccggccctgcaccgggattggggattgtcagctgctgctcccatcctctgctaagcctttagatgtgaagtatccacaatggtgacttcaggttttattggcgttcacttagggtttatgggaaaggcagcatttgccttgtcttcccctaatctgtagttactttaatacatgacatttcagaagggctccaggaatggcttcttctagtctgcaccccaggggactttattctcttactccacagtgcttagtccacagtgcaagatatagtacatggttcacaggtattttttttttttttgcccagttgaaatggtacagattaaaaaaatttaagaaccattttttcttttttacttgtgttttcttctcaggttagagatgcaggatattcttttcgaacagtatctcttttgaatagctttgaagatctatgagtcatatgaagttctcatttttttaaaaagatgaattgaattaagaatgtttgttctacctgtgcctgacaatcttatggagcaatggcaccctctcaattgagagggggcagaaagccatcacagcatgaagcacaactgtttttatggaggctagactatttgaaatgttctctttggagaaggatgggatttatcttcttcaaactgatagaagagaggtgatcatggaggaaggcttgactactcaagggaccctaagtc

SEQ ID NO: 36027 - DNA, 1200 bp, Mus musculus
aaacattttaatacgcagtggttatatgggctcacttggctattttcttttttttctttttctttttcttttctttttttctttttttcttttttttcttttttttttttttttttggtgttttgagacagggtttctctgtatagccctggctgtcctggaactcactttgtagaccaggctggcctcgaactcagaaatccgcctgcctctgcctcccgagtgctgggattaaaggtgtgtgccaccacgcccagtgttggctattttcttgaacaatatagctacagagcatttccaccatcacagaaagttccactagaaagcaccgtgaatctaaacagtcaaaatagtcaactcaggaccaagtctctgcatctacatgaagcatgattttgtttttctcacttctgttgtctctttgcaccggtgtgtacaaatgggtaggaaggcaagtaaaacaacttagcagatgaaccctcttatgataaaaagtaagaattcattcgaaaaaaagggcttctgtcatgagtggcatatgcagggcaacttgattgctctaagtgcagaattgacatcaagagatttcggaagcataattttttggtatttgggcagctggtgatcgttggtcccaaagcctgtgtacttgttaaaataaaggcttaaaaaaagaattcattcaggaatggttaaataaaataaggcatattcactaaatggaatataacataaaagtttaagggaacaaactagatatatctatgaaaatagacctcacaagtatctgtatgagggcggaaaaacaaactgataaatgcaatcaatgatgcaaaaagaaagcaatggctatagtttgaacgtgttggaaacatgataacatgatatcggattttatagttttttttttgtttggttggttgggttgttgttgttgttgcttggttttttgagacagggtttctctgtgtagtcctggctgtcctggaactcactctgtagaccaggctagcctcgaactcagaaatccacctgcctctgcctcccaagtgctgggattaaaggcaccaccatgcccggccggattttatagttttaaaagatgagacttctaggaggtgaccaggttgggaggcttttgccttcaaaaatgaactagagccatcatcatgacagtctctttgacattatgggagtggc

SEQ ID NO: 36028 - DNA, 1496 bp, Mus musculus
aggatatattaatgtgcatgtcaacagtaaaagaagaatgaataacaggacccagtacccaaggcactggagttggcagaacctcaagggaagccttactatacatctagggcctacctaccagttggacatataggggacagttgcacataatctcacccagtctatatggcatttatggtttcatgtatgctcttgctgtcctggaactcactatatagtccaggctggcctcaaactcaacagaaattccccctgcctcccaggtattagatttcaaggcccagtgtgggatctattgggggagagaatgctcttgagcctggcaactctgtgtacagtcccttgtctcccacctcactctacctctccttcctggctttgacaggtgatgctcctgttgtgttccagcctctccttagattagactgctgcccaccaccctccgctatacatatctcacgccccttttctactatctctctcccatccagaactccatccgtcacaacctgtccttgcacagcaagttcatcaaggttcacaacgaggccactggcaagagctcttggtggatgctgaaccccgatggcggcaagggtggcaaggcaccccgccgcagggctgcctccatggatagcagcagcaagctgctccggggccgcagcaaaggccccaagaagaagccgtctgtcctgccagctccaccggaaggtgccacgccaaggagccctctgggccactttgccaagtggtcaagcagcccttgtcctcgaaatcgagaagaagctgatgtgtggaccactttccgtccacgaagcagttcaaatgctagcaccgtcagcacccggctgtcgccaatgaggccggagtctgaagtgctagcagaagaggaaatgccagcctcggccagcagctatgcagggggggtccctcccacgctcagtgaagatctagagctactggatgggctcaatctcgcatctccccattccttgctctctaggagcggtctctccggcttctctttgcagcatcctgggcttgctggccccttacatagctatggtgcctccctctttggcccaatagatgggtctttgtcagcaggagaagggtgcttctcaagttcccagtctctagaggctctgctcacctctgatacaccaccacctcctgctgatgtcctcatgacccaggtagatcctatcctgtctcaggctcctacacttctgttactgggaggaatgccttcctctagcaagctgggcacaggagtcagcctgtgtcctacgccgctagagggtcctggtcccagcaacctggtccccaacctttctgtgatggcaccacccccagtcatggcaggcgctcccatccctaaggtcctgggaacccctgtgctcgcatctcctactgaagattccagccatgacagaatgcctcaggatctggatcttgatatgtatatggagaacctggagtgcgacatggat

SEQ ID NO: 36029 - DNA, 1921 bp, Mus musculus
caccccagcatctttgctcttgaatattcaactaattctatgctctgagccagagggagccttacagcagataataggagtccctggggaggtggaaaggtggatgtcatactagaatagcaaaacttctaaatggggacctgtgggctcctcatcacagaagggggagctttgggggagggaagggtgaaggggtgcctctggtatgactctgctgtcccaaatgaatttcttagcttgtcctccatttcttttgttccacagatccctgagtcacagcaagaagctttgtcccctgcttcggaggtggaggtggagccaggcctgtccttatccacttttcctccttgagccctccccaggagtttgggaccctactttagagctaaggattggtggcaacacactcaagtgttgaggaaattataaagataaatctatgacatgtagggattgtagaggagggtgataggaggagggagggaaaagggctttgtctcactgtgccaattagggggtagttatggtcctttctcaggggccaccattgatttcctcattcccacctcctaggcctgtagcaggggccagcaatgctgttgaaatgtgaagtcaccagtggccttattaccctgcctttgggagcaggattattattttttttggtagagagtcttactagagctgggccaggctgggttgagcctggatttttatgcagtggggtgggtgggtggggggggccgggggacctaaaagggccaagttttgagcactggagtggctcaccaggccaaatcacttttggaaggatgcagataacagacaggctttttataaacttttaaagaaatataaacacaaatatagagatttttaacagtggtgaggtgctagtgatggggagaaggcttttttttttctttccgaaggctttgtcatagtgacatgatacaaacactacagactctatggaggagacacaggaagctagggagaggtgggtagcaagagttttaagcaaagaaacctaagtcaggtccccacattctgttcacttgtgcctagaagagagtgctgttgtggggcaagcacactcttatttgaccagtgcaggttagtgctcccagagagagcatccaagtcctgaaattggcttggggcctgggaggggcgtgaaagaaggaaggatttagggtagtaaagttaggtacagagacctcgctgttcaaggcctgggacagctgtccctgcccttcttccctgttgtggtctgccagggttatgtggaaggctgtgtagcagcaagcagggctgtggagaggaacagggaagggagagcctgacgagtttggctgagggtctgggaaatgagcagggttggggggaatgtggatcaggtttactagcacctgccagagaggccatctggggctcctccaccccagcccccaagcagcccctcccccagcgcctttgcattgtcccctcccccactcctgctgtgggttcccatcatttcctgtgtcagcgcctggcctacccagattgtatcatgtgctagattggagtggggaagtgtgtcaaatcaataaatgagttcaataaatgtctataatcagatctggtttctggtttctgctgcctttgctgccccccccctccccgtccaatatggggggagggagggaggcggaaaggcgaagggcagttaggcgaagggctggtgggagggactgcccgcaggctgggaggtgggggaatttcagcctgggaggtaatggagtgtgttgggggagggacacctaaccccagcaggagtaggcggctgcaagataggcctcccccgaggggaggtagtctggtttgagaagaccccacccccttctctggccctcaaaggcttattgtactaaaagtc

SEQ ID NO: 36030 - DNA, 1099 bp, Mus musculus
caatgagaagctcgccttgttcatgtttcaggtaggagcaagggcatgttgtacatggcattgagttgcaccttatcctgtcctgttggaatagaatggaatttgccttttaccttgcccctggtatagctctcttcattcttccatttactttatctgccttacctctaatagttccctgctatccataggatggaatgctggacagacatgagttcctgacttgggtgcttgagtgttttgagaaaatacgccctggagaagatgaattgcttaaattgctgcttcccctactgctgcgagtaagacctaggcccagggagggactatttagagggatttgagtaagaattagacatcagagcagtatcttctggagaaacctagcgggctctgttggtcatatctttacagtactcaggggagtttgttcagtctgcctatctgtcccgccgccttgcctacttctgtacccggagattggctctccagctggatggtgtgagcagccactcatctcatgtcatagctgctcagtcaacaagttctctgcccactaccccagcacctcagcccccaactagcagtacaccctcgactccctttagtgacctgcttatgtgccctcagcatcgtcccctggtttttggcctcagctgtatccttcaggtaagtacttaagggcccaagaaagtataaagaattgactgctcttcctggagaatgggggtgagttcaacttggaggtgggagcaggcaccgagtacctgttcaagaattagtgtttctctgtaataggatgttcccttttagagatttcggacattgtcttccaggactaagtaatatggcccaaagctttttagaaaagtgcatgagaatctgggtatgatagtgtatgcccgtagtcccagaacttggaaagaagaggcaggagggttgtgagttcaaagtcagcttatgctacctagccaaatgaaaccttgtctcgagatacttttttttttttttttaagaaaaggaggaaggtaaggaagatggggatcaggaatgatacctgctccaaggacttagtcataataaacctaattgagatgtc

SEQ ID NO: 36031 - DNA, 1931 bp, Mus musculus
cagcccttcgctgttctccctttatttcgttataaagctgtatttggcaatcctgcagccttatctcagtgtccttgattgtgctctgggagatggctcattgggcctgttttctaatgagtctgggtcatttctccccgctatagacacaggtcctgggaaacgaaagagagaagatgaaactatcttagagcagcgtgagaatcgcatgaatcccctccgctgccccgtcaagttctatgagttctatctctcaaaatggtgagttggtgagtgtgtaagaatgacttaccgtgtggacctaagaggcctgctttgccttggtactactgatgtctgtctccccatccccactcttacagtcctgaaagcctccgaactcgaaatgatgtgttctatctgcaacctgagcgctcctgcattgccgaatcacctctctggtattctgtgattcccatggaccgaagcatgttggagagcatgctcaatcgcattttagctgtgcgtgagatttatgaggaacttggtcgtcctggggaagaagacctagactgagcccatgttgtaccttgtacccatctatcacatcagtgtctgtcctggaaccaatgctatccattctgaagggccctaactggctccttctattctctccttccctgcctttcccaggaacccctgcctttaaccttctttcataccacttgataatcatgggcccccagtgtactcaggggctagtcccccagtgatgggtgtgaacctggtagcccattttgtttatggaaaccctttctgctggggcctgactctgatggagtgatgatagctctggtgatcctgttggctttgcgttttctgacctacatctatgtaggtgaagccctgtggccctaggtgtgacctagggaagaacccagctgccttctctgccctgtatcctctctctctctcctcttcccctgtaccatgtgaaagggtcttgtctgagaggtctgaaagtgaggggaccatttacctaaagcacagagctcagacactcttatccctcctgagagaagtgattgtcgacaccctgcactaccacatccattacctgaccgacccttccagcaccacacagtgctacagtttctcaagggttccagatactttctttttctcaaaggcagagaatgactcagtatggagagcagactcctattgtgcagatgactcctgtccccttggtttatgtgtttgtctctctctgccatcttaaggtggcgtgaaccatggtgtcaacatgcttaacccctctgtaagctgcctccctttagttccatgaacagagctcccaaggtaaaaatgaccttcgcacttagactggggctgggttccccaatgttctaccccttccatcaaagccaggcccacagtatggggtcctaggccatctaggatggggtttgtggtcaaaagataggtgaggagctgtgggccagggtcctacacctactgcctactgtcttctcttccccatcttacctttgtgggcccagaaaggttagtgtctgtcagagggagcacccagttctttccctgttggctttgctgttccccagccttctttttgtgtttttataactgtcctcagtttagccactgttaaaatgtatatattgtactgaggtgcctggcctgttccttcagtgagccatgcccacccttgtgttgtagtgagaaactgttgtcacaactaacttgtctctggaattgtttcaaataaagagttaaaattgttctttgctttctctgggggaggtagagctggcgttgaagagtggaagagaagagaaagagcacccactgtgggtccctgaagattagtcttccctcagtcaatgaatatcacaacgttggtcctcttctcatacattttcagatacatc

SEQ ID NO: 36032 - DNA, 1126 bp, Mus musculus
gcggggaagggctgagagaggacgggctccgcggggaggggcgctggggctggagaggatggggagagactggagacctggggggcttttgggggggagtgagaagggaccaggggctgaggtcgccggagcgggaaaggtttctggctgcggcaggcacgggaaaatgtgagggggcgttgagtctgaggtggggggtgtgtgagaggtagggaggaaggagctacgagtctccgtggggggtgtcgggcgggttagagaccaactgcctggcgagtgtgggcacggggccagggcagggaacgccactccccacagagggcgctgtattggggggggagtggacattgagcctgaagcctgtggaaatgcctatcggctgtggggggcggctgctaatgagaaatccaagtggatgacggacggggtgtgtcccacagccgacataagaaattcaggctaagaccacctctactgccccctcttccgatctgcagcccatacccagccatggaccccagtgatttccccagtccatttgacccattgaccctgccagagaagcccctggctggagaccttccagtagacatggaatttggagaggatctgctggaatctcagactgccccaagtcgaggatgggctcccccaggtccgtctccatcctctggagccctggacctgcttgataccccttctggcctggagaaggaccctggaggagttctggatggagccactgagctactggggctgggggggctactctataaagccccttctcccccagaggtggaccatggtcctgagggaacccttgcatgggattcgggggagcagaccctagagcctggaccagggtgtcaaacccctgaggtgatgccacctgatccaggggctggggctagtcccccttcacctgaggggctactagaacctttggctccagattctccaataatcctggagtctcctcatattgaagaggagataccccccttagctacaaggagaaggggctcccctgggcaggaggaggagcatacccaagggcagccacagagccccaatgcaccccctagcccttcagtgggagagactctgggggatggcatcaacagtt

SEQ ID NO: 36033 - DNA, 1235 bp, Mus musculus
cacccactccccctttttggccctggcattcccctgtactggggcatatatagtttgcaagaccaatgggcctctctttgcagtgatggccaactaggccatcttttgatacatatgcagctagagacacgagctccggggtactggttagttcatattgttgttccacctatagggttgcagttccctttagttccttgggtactttctccagctcctccattgggggccgtgtgacccatccaatagctgactgtgagcatccacttctgtgtttgctaggccccggcatagtctcacaagagacagctatatcagggtcctttcagcaaaatcttgctagtgtatgcaatggtgtcagcgacccacgttttttgagaggcattttgttgatggttgcttggttggtcttttgtcaaattctaattttctttttgttttccccaggaaacacgaaccctagcggaaattgccaaagtggagctggacaacatgcccctccgtgggaagcagctgcgagtgcgctttgcctgtcacagtgcatcccttacagtccgcaaccttcctcagtacgtgtcgaacgaactgctggaagaagccttttctgtgttcggccaggtggagagggctgtagtcattgtggatgaccgaggaaggccctcagggaaaggcattgttgagttctcagggaagccagctgctcggaaagctctggacagatgcagtgaaggctccttcttgctgactacgtaagtaattttcagacaatggtttggggtcccttattctttctttggcatggaacattaacatctaataaccatgttcttattttcatttaaaaatttagtgctaactcagcttttctaatgtagttttcactatagtcctaaatacttaggtattcaagtgcatgtatatgccatggtgtacattggggagtcgggacacctttgggaagttggctttgtccttccacctttacatgtcttccaggaccaagctcagggtatctagcttgcatgtgtctgtatccatcatggtatagtacgaggatagctttttaggctggaaaagtacttcagtggttaagagcactggctgctcttggcagagaacctgagttggattcccatcactcacatgttggctcatctgtaatttcagttctaggggatctgatgccagcctaaataggcaccgggtgtggaagtggtacattgatatacatctgg

SEQ ID NO: 36034 - DNA, 1117 bp, Mus musculus
gccaatgtcaggtgtcgggagcatacttgttagggtatggcctcattaacactaactttcttctatcacccagatttcctcggcctgtgactgtggagcctatggaccagttagatgatgaagagggacttccagagaaactggttataaaaaaccagcaattccacaagtgtgtggtccagtagttgacttttatacatttctggggaggggtgggatgtgtgtttatatatgtggtgttggtagttgaacccagacccttaacatatttgtcttacacttcatcccgtagttatttttctgttcttgaaacttgaaggggtggttaaaagaggcatgtctttgctgtatacctgtgtttgcttggcctttaaaagagagtgattctatggaatcttggacaaaagtattatcatacataatgtgtattgtctatagggagagagaacagccacccagatttgcacaacctggctcctttgagtatgagtatgccatgcgctggaaggcactcattgagatggagaagcaacagcaggatcaagtggatcggaacatcaaggaggctcgtgagaagctggagatggagatggaggctgcacgtcatgagcaccaggttatgctaatgaggcagggtgagtagaggcctgtaagtagggaaagtggaatacatatcaaataccagttttgttcagtaatttctttatttcttagtagaaaaagacaaagtctctgtttttattccctgaaatactttgtttatcctagtagggagatgaatttggagatgggtatagaatactagaagagtcaatgaagaaagaaatggttaagtttgagtttacttgcatgatccttctgggattatatattgtcttagttaagggttctgttgctgtgataatacacgaagcatggccaaaagcagtttaaggagaaaaaggtttattttatcttaaaatttaggtcactgagagacgctaaggcaggaactaatgttgattagattgttacccagggcttgtccatccccccctttgtttatttttggatgttgatgtttttgggggtttgtttgtggcttggtttccttggtttctctgtgtggccctagcta

SEQ ID NO: 36035 - DNA, 1448 bp, Mus musculus
atataacagatgtgaatccaagggccttgtgcttcataaagtcctgaagttgttctggttgtaatgtcaaaatggaatgggccaaaactggatagatgtaaggttcctaaagaacaatagtctgtttttcctggctcatgaaaaagaaattggctagaacctatgcaacctcgaaatgtcagttgtatgtaaaatgtggatagaaagctaaataaagatggatggatgactgactggagccgtaactagtaaagcctgcctttcctctcagggttctccattagagctctaaacagacttggttgcctgtctcctaacagtcaggaggagacttgagtagttaagtagaaatggcctgtagtgggaagaaaccttagatgagctagaacctgcagagatagattctactgtaacattgttctctttctcttttttaagaccccaccaacaactgaacgttttggccaagctgcaacaatggaaggaattggagcaattggtggaactcctcctgcattcaaccgtccagctccgggagctgaatttgctccaaataaacgccgccgatattagataaagttgcattgtctagtttcctgcagcccttaaaagaagggccctttttggactagccagaattctaccctggaaaagtgttaggggttcttcccaatagataggccttccctgcttgtactactctagggagcatgcttgaaggcagaggggcaagggaggggtggtattcaacaagtcaaagtctgtggtatattgctttatcaagactgtctggtgcattcctgaactatattgattgttgagggcctggagaaccatgggaaaatgaactcagagctccattaatcttgatcattccttctctctctttctctctctcttgttttaattactttctcatctttattcccctcaacccctgagacactgccatatataccacaaaccataaacatcctccaatgacctagccccatccctccattcactcccaggtaagaattcagacaaatgtccacagaggttacagcatacgtacggttgtgttatatctcatatatgaccccttcatgtcctaaggaagacattttctcttagaggttttcattttagtatatcttaaaagaatcttgtgttaccttgcctccatctttttcttgggtaaggactacactttgtgtctctgatgttgctgttcacagcttttcttgataggcctagtacaatcttgggaacagggttgctgtgtggtgaaggtctgacagtagctcttagtcttgcctatcttaggtagctacgctgtgcatttttattggtatactatgaattgttccagataccttcagtttggaaagttttctgagaaatggagacgtcatgcagcatcaccttattaaaatacatttgaagccttttcattttctgtgctg

SEQ ID NO: 36036 - DNA, 1297 bp, Mus musculus
ggctacatgtgccagcactcattttacatggtgctgggactccaacccaggatcttgtgcatgcaaggcaggcattctttcaaacaagctatatctctaacaaatacatggtcttttgaaagtcctttcattcatgacatgcgttttgttttggtttgtttgtttttcaagacagggattctctgtgtagccctggctctcctggaactcacttgtagaccacactggcctcgagcacagagatccacctggggcaagattttccttacccaattacattaaaatattagtacagcagagggcctgtgattggacagagaaatgggaggcggagcaaagagttgcaagaacggagagcgactaagaggaggaaaagctaagatggaggcagacggacaggaagaagatcccgatcccgcgtggttttaaatagccacaggtagttatgaatatcatatagggatagaataattgggaaaacttgtatgatctaggtgggcagcttgtatcattatcaattggctctgaaattattgtgtggacctcttgtgaattgagattttttttttgatacataaatctaacctgttaattataagcctctagagttttgtttctattgggttgctggggcttgtggccgctggccgtggggtggacggtcgtttcgtggggctggtttggcggcaaagggaactccggagccatgcatgcagagtagttggatggaacgaaggaatttggcagttcttttttcgtttttggtttttttcgagacagtttctctgtgtaactctggctgtcctggaactcactctgtagaccaggctggccttgaactcagaaatccgcctgcctatgcccccaagtgctgggattaaaggcatgtgccaccactgcttggaggcagttcatttttaatatttcctgcaacatctacctatccctgcttcctgagtgctaggattaaaggctcgtgccaccatcattcagcggctctcttgaatggtgaatattgcactatgcagatgtctcgttatttgctttctgacttctcaaatgatggacattttggttttcactatttttgggagacaggatctcattctgcagctcaaattctaggttatgtgtgagccaccatgtccagtttgggttttcaattttgttataaactgtaatatgagatccaagacatctagggctacacagagaaactggtcttgaacaaccaacccaaacaccaatatggcaatttctgcacgaggttttctgtgaacacgggtttctgttattt

SEQ ID NO: 36037 - DNA, 1185 bp, Mus musculus
attgctttacttgctaatatagtttaatagcaatattgatcatcataatttttaaatgatttacttatttttattttgtgtgcattggagttttgcctgcatgtttgtctctgtgagggtgtcaaatcccgggaactggagttatagttgtaagctaccatgtgggtgctaggaattgaacctgggtcctctggaaaagccaccagtgttgttaactgctgagccatccctccagccccccaccataattatttagctagtcccttagtaagtaggctgtttaaatttgaactattataaacagtattacaatgaacattttgttagcagtggtttctgtcaaagagagatatacgtgatatctagtaggtttcgtttaaatagttacatgagtacctgcactaatattttttttctgtttgctaggatcataactgaaaggacaattaatgttttgtttgttactgttttctcttcttgtttggtcaggttttacagctacattggatgatgataaaccttggtactccattttccccattgataatgaagatctggtatatggacgttgggaggacaatatcatttgggatgctcagaacatgcctagaattttggagcctcctgttttgacacttgatcccaatgatgagaacttgattttgggtatgttgatggcaggagccaatgctccttatctttgacatcttattattaatggcaaaggtcaagaggatataaaaatgttagagaaggcaaaagctagaaacttttaggtgatgcttttttaaaagcagagttgtagctgccagtttttagtgtttgaatattgtttaggaaaaactcatgtagggatatttaaaattgtatcttcaagacatcattagacatggcttgggcagtagtggtaaacaccttgggagacagaggcaggcagatccctgagttcaaggtcaacctggtctatagagttctaggacagccaggactacatagaaactcttgaaacaaagaaacaaaagacatcagatatagtctagctggagagaattgccaactaaaagtagtctggaagtgaagtgagacatctacttagaaactccaaaattatcagtggaaaggtgaattttagctggacctagtagcatggatcccagctacttaggaggccaaagcaagaagact

SEQ ID NO: 36038 - DNA, 1191 bp, Mus musculus
tcacccagccccgtttttttcttttttgcggggagggagggtcctcatgcaatcaggctggcctcagatttactgtgtagtcaaggctggtcttgaatcctaaccttcctgttcctcctaacaaggactgggattacagaatatgccactatgtccagctttgactcaatttttttgagagatagtttctttccatagctcaggctagcctggaactactgtagcctaggacggccttgatcctcctgcctcagcctcttgaatgctgggattagaagtatatactgctattcctggctctatttttaaagtttttcttccttttgtctattaggttctaaaagacagtgggtaaaaaaaactaaaaaaaaaaatcttgtgtgatattccatattttactcatcttattatatagactttagagctaataaatataggtaaaattaagtttttttcccttttttaatagttggctgaattttctaaagattctctgtaaataacttttgtggtttactttcattaggcatttgagaacaacctttttcgtgctccaatttatcttcataagatgccagaatctgacttcctgatcattcgaacaaggcagggttactttattcgagaattagtggatatttttgttgttggccagcagtgtcccttatttgaagttcctggtcctaactccaaaagggccaatacacacatccgagattttcttcaggtaagatgggagtgtgggagttgggctaagatgcacatgctaatagaacgatgaaaacacatctgagcttagttggagaaggcaccttggtaagagcttttatcctttatgtaataaaatgtatttggcttattggacaggtttttatttaccggctcttttggaagagtaaagataggccacggaggatacggatggaagatataaagaaagcctttccttcacattcagaaagcagcatccggaagaggctaaagctctgtgccgacttcaaacgtacaggtcctcagtgtgacttcttgtcttctctgatgctcttgtactcctaaagaattatgacagtcagttaaaagaaattataactaatagaatagaaattgatggttgtaagagaaggtaccaaaccttgtaactagagactttgataatttgatgataattggttgctagtatagtccaagtga

SEQ ID NO: 36039 - DNA, 1238 bp, Mus musculus
agatcctacaggctgtggtgaagggttctcctatgtgaagattccaaacaaaccgacacaacagaaggtgagagtctagaaatcaaaatggaaggactgagggttgagcagtcgatgaatagagtggagggcctggacgtgcttcatttaccacaatgtcatagatgcttactgttaggaggtcagcttcagatttttatttgtttctgtttgagacaggatgataaagagcctcagccagtgaaaaagacagtcacaggaacagatgcagaccttcgtcgcctgtctctgaaaaatgccaagcagcttcttcgtaaatttggtgtgcctgaggaggaggtaggtttagaagaggaaaactcctggtaagaggttttgtatgcagagagaaaaggtaggaagctagaaagaatcgtctggagcttcatatgctgtagaggctttaccaaaacttgtgaaacttcttttaggctttgattttttttttttttcggtttctaatcatggccctgttttgtcctttaacatccctgaatgagttacatatgtgtagttctgtgtttctttcagattaaaaagttgtcccgctgggaagttattgatgtggtacgtacaatgtcaacagaacaggctcgctctggagaggggcccatgagtaaatttgctcgtggatcaaggttttcagtggctgagcatcaagaacgttacaaagaggaatgtcagcgcatctttgacctacagaacaagtatgttatattcattcagtactgtttaaagtttaagctagaatatggacgtttcctagacatgctatattttgaactaataatgcttttgtacatgcaaatcactaactctatctcccgctctcagatactatttttctattttggaatgagatagccctgctgatctcgaacttgctatgtggggtatgttggcctcaaacttttgataattctatatctatctcctatgttctgggccataggtatccatgctctaccagatatttcgaaagaagaggatgttactttaaaaaagtgtaactaggttgttgggtatctgaaatatcaggcactgtctgtaataatactgccagagtacctattcctggtttttgtgtgtgtgtgtttttgtttgtttgtttgttggttggttggttggttttttttcgagacagggtttctctgtgtagccctgaattcactctagaccaggctggccttgaactcaga

SEQ ID NO: 36040 - DNA, 1528 bp, Mus musculus
tttagtagtaagtaaaatagtaattatttctctagattgtagagtagcaagttcttttccctaaccactaccaaaaggagagagcagactcactcttcctcattacactcctttaatggcatttattgctcttgttgtataaacatgccaccattttactttctaattggcagactggaacaaaggaaaacccctctgctggattagagaattaggtcctgatgagctggctctgtgccacacttaaaatataatcctgttagacaaactggttgttcatatattacttacttggatagacaatgccttgttgctaaatagattacagggatgtagctataaatctctgaatgataggtggtcatgtaaatgtcctcttcccccaccctggaaaaaattataggaaaatggttagtaccttagggcaaagactgccttttggttttttttatacttaggatatggttttatgcaaagtaactactcagtagatgttcttaaaaatcacagaatcccaacagataatgttactgtgtgcctgattcatgtagagcactctatcagacctttgcagtgcaaaggttaaataagagcttgccatcaagttggggcagtgagactggaattcaaacaatgttaattaatcagagaactctaagtacaattaagaagctagctgtaaggtacaaaggaaaaaaattagaatcatgtgtggaaaagcagagttttctagaggctacctgaatgctgattgttgagaagttatagagtaccatctcagcagggtgttaacatgaagggaaagttcacagtctagatgtgacagaatgtgttccttgtttgtacctgccttgtttcagaaaaaggatgctggagtgactagacatgacactgaaagacggacaggaagcatatcttcaagagctttgcatttgagctaggcatggtggcacatgcctttaatcccagcacttgagagacagaggcaggcagatttctgagttcgaggccagcctggtctacagagtgagttccaggacagccggggctacacagagaaaccctgtctcaaaaaacaaaacagaaaaacaaagaaattttcagaatgttgaatgaagatagaaattgagtcaagtaataaacatgtatgattcagtttgtctagaagtcaaaaattgggtatatatgatatgcttgtatatacttgtatgtgcaaaggaaaagatatgaaagaatgtacattaaagtgttagcagtgatagcctctgagggatgggaatggagaggaggtggtttgtttggtttatgtacagtaggtaagtgttatgcttttatttctgtatcttagttttataatgtgtattattttttgtaataaaatgttaatttaacagcaatagaatcgagagtgattttaagtagtccaagctaaggaggtggaatctaaagttcaatggtgccattggaatgaagggaaggggaatggcattaaggcatcttcagaaaggggtgtgatcaataggacttc

SEQ ID NO: 36041 - DNA, 1138 bp, Mus musculus
ttaattaaacttttctagacgctctgacattctaacatcgacatcactgaccaggtagtagactcgtactttagcgcttgccaaaaaaaaaaaaaaaaaaaaaaaaaaaaaaagtaatcgacgggcgttttttgcccttccgccttgctcttaaaaacttgctggctcttgccccatagggagcccttaacccggagttgcctagacagggttgtcgcatgcgctctctacagtcatgtttgtcgcaatggaccttgggcggaaggttacgtaagagcaaatgactttgattacagtcacttggtcggtagtcttgttacgcgctacctccgcggggtacttgattataacagaaagtagttccggcttgtgttgtttcggtcgaggagccctcgccgccatttcaagacagtgagaggtagatgtctaccaagagttcctaagattcgagttcagtattctgtgccgccccctgagcccttcaaaacactgatacggctgctgccttttttctgctacttctagaaccattcttgtcagtagtggcggcagtagaagtcaattaccccttgttctatctcaagaagctccagatggcgtcttccgtgggcaacgtggccgacagtacaggtactagtgtcccattctactctggcagacgtccctttggggtctggcgccgtcttgtatctttcattacttccctctgaccatccccattacatcagtggcattactgagctctcgagttctactgctatctgatcgggtttggtgctgccgtccgttcgtaaacattctctagttgcttgcttgcattttgcttgctttgggggctttttcgttgttgctttatcccatcagtgttgtagccttctctctcgggacgaatctatagcacacgtgcgcgcttagtgtgtcttggaatgggctgcattggaatctctgcaatttctgtctcccgtcgcaactgttttctccctcaatttcagcccgtcgctccctcccgtgcgcttccacctcctccccaaagcccctttcccttagccacatttggtcctcctttgccaggctagggcggggatgctatttcggtgtaatcctagcctcactttgcatcaggcatgactagcgaagg

SEQ ID NO: 36042 - DNA, 1108 bp, Mus musculus
aagctaaatttgtcacatctttatctaatagagacttgtttgttatctatgtaaaagaagtgtttctaggaatctttaaaatatttgaaaagctttcagtgttttagttaaatttgcatttactattctagaggattatctttctagggccttagcccagcattctaccattgagctactactccccagcgccagaacatcagttgcttattttgtaaaagtgtctcagagagccccaggctgcctacaaacttactgtgtagctgatggtgacctgaactactgcatgctcctacttagacctcccagctgcttgaattacaggtttttgccatacttggcttaatgttccaactctaattacatatcttactgaggacttgctgagctgtgtgtatggagtagaggaacatacatacttaagagctcactgcttgtttctaccactatcttttagaagagttaaattaactgaagacaatagggccaagcattagaaatacttatatggtagcgcaagcctttaatagtagcacttgggaggtagaggcaggtctgaactcaggatctctgcaagagcagtcagtgttttggttttgtttgtttttattttgttttgttttttgttgttttttttttttttttttttttttttccgagacagggtttctctgtgtagctctggctgtcttggaagtcactctgtagaccaggttggcctcgaactcagaaattcacttgcctctgcctcccaagtgctgggattaaaggcgtgtgccaccaccaaccagccaatcagtgctcttaactgctgagccatctctccagccccacaaactgagttttattctagaaacaaaatgtaattggatatttaaaattacttcagaataaaagctgaatgagaagttaatgtgataaaatcctatctttttctaactgactgtcttctaattttaggctgtcacccttgacccaaattttctggatgcttatatcaatttaggaaatgtcttgaaagaggcacgcatttttgacaggtaagaatgttatgtttgatcaatttccttgtctttctagtttggactaaaatgtggcaatagcttcc

SEQ ID NO: 36043 - DNA, 1088 bp, Mus musculus
tgtcgcagcttatcttcgtgccttaagtttgagcccaaatcatgcggtggtgcacggcaacctggcttgtgtgtactacgagcaaggcctaatagacctggccattgatacctacaggagagctatcgaactgcaaccccatttccccgatgcttactgcaacctagcaaatgctctcaaagagaagggcagtgtaaggattttgccttatttttacttccttgttatgtggtagaaaagaagagtcttcattcatattacatacatattaagtattgagatgtacatattaagtactgagatggttatattgatttcctttggagtgttgtttgctgggcaggaggatactggaaagtgtctgttttctggtgtgttcccaaccattagactcaatgatgcacctacttgaattactagaataacagtggtctctttgattcttctgtgtagtttctgaatggtttgtttcattttccaggttgctgaagcagaagattgttataacacagctcttcgtctgtgtcctactcatgcagactctttgaataaccttgccaacatcaaacgggaacagggcaacattgaagaggcagttcgcctgtatcgcaaagcattagaagtatgttcagtgccgtggctggagggtttagcctagcctgtgtgacaatagagggaaagcagttgtttgcctgccattcacctctgggttgatttttattttatttttacttttggttttagttttggattttgaggcaggggttttctgtgtagccctggctgtcctcgaactcaactgtgtaggtcaggctggcctcaaacccagagagtcctaagtgttggggttaataaaggtgtgcccaaccactgctcagctgccattcacctctttaagaggatcattcattattgatgtaaggtcctgtggacatgtaagacacccctatattgagctcattatgcataggtgagatctgcacaaagattgaccagtaagctaagtaaagctagtgcagtgaagaactcaggcctgtgtctagtggttagtaggtgtggaggttgataaaagtggcattactcagcat

SEQ ID NO: 36044 - DNA, 2490 bp, Mus musculus
tgttgcagacggatgatatataatgataatagaatagcacattcagacttacttcctgcatgatagggagagacaagaaagaagaaatgctattccacaaggaatctcttagagttttgcagcaaacaggtggtgcacaggtctggaaggtctggtctcccttggtcttccatgggatgcttaatgtggaggggagatagagattaaccagccgttttgtgatgccgtggattgatcaagtcttctgatccttttttttttctttatattttgggttttggagcttttaaaaatgtttgctttcaggtatttttactcatgtgaagtgatcttgattcttctgaggttttaaactaaaatgttgcttcctgttttagtgtctgaactctgacagggtgacagggaccttgctggtgtagtctttttataggttttataaaccacatgagcctatatcagtcattttagtgtctgacctaatgcttggcactgtcagtgctttgtttagatgatgacttaagacttttcagcctgttttacacaccccagctcccgttaaattctcctgtgactgctaacaaacccatgtctgctttcagacatcccagggtgtttctctcgaacatgccatctggtgccaaatgaaaattcttaggagtgaatattaatcatgaaggtcacagttgtggtactgttattgataataatatagggtttttttctgcctaagttttacctgtttcaccagtgtttcagcccttgactgcccctcctatgctgcttccaaaagtaatagtgtgataagatttttaccttcctttctaaagtttgttttttttttaaagtgagtcctgttcttcccatttctttcagcagaaatgaaatcccaggtaagtatataagtattcaaatgtttggttagtaaattacagttctctccagtaccttaaatggtgttcaccgctctgaagaagcatctctatacaggcagttattttatttttagactgtgttagaatgtctggacttagcttcaaactctatggattcggccttggtagggaattgtaccaccacttggtttggactacaaattaaacattggccctcgcggagcttgagttcttcatggtagaaaacagttgcatttccgtaaagggtggagggcttgaggcttaaatatatgagtatgtttatactgctctactgcacttagactctccactcacagataagtcttgtctgttagtagtgctgtagattaagtctttccaaagcacctaggcagtgcacctattctgtagttgcagctattgcctgaatgtaccttagctgacaaattattgataattaagaacttgaatttgtgattcttactgctaattaaaacctaagcaagaagtctcatgtaattctgatagcagaattgcattgtgtgaactgtgtaactttagtaatgtaaatcaaggaacatcagttaagagatttcctaatttattttttaactgaataaatatcagttaaaagattgccagcatggttacaggtaaactgattttcagaattcactgaactactaaatgtgggattggataatagacttggagtgccgctgaggctgagatctgtggccatttacatagcacatcattcctcctatagggatgaactttttttccgacacaaaaagtagccactgcggttaaagctttgcttattgtaacaggcttttatttccaggtaacctatctgtggaagacctaattctgaatagagtaatagatattactggaaactgatttgttttttttttcctattatactctgctttattgaaaaagtaaagcatttaaaattgtgctccagaaattcagatgttgtcttgcgatctttaaacaataaaatggatgatttccccttaacatggcttggtgtagtttgtctcattatattgaaacctattcttgaattgctcaaaacagtccaaccagaagtgtttccttaagttgatactaggaattaacattattttctttgtgatgggagggttggaggtggtaaataatccactaaggagaaacagagtcccattctgaggattatgcatatccagcaagtatattaatatggagctggaactccagcctatgtagtacattctttatatggacttggtttttttttaggtatttgcagacagaactgttttctattgtgtacaaactcagccacaactttggcttccagctttttcagaaacataaaagggaaatatttggaactggagagattgcatagcagttggtagcactgggtgcacttccggaggccccaggttcggttcccaacatctacttggcaaactattccagatccaggggatctgacacctcttttggcctccttgggtatgcacatggtgaacaggtgtacatataggtaaagtacttataaaattaaaattaacatggtgcatatacacacattcag

SEQ ID NO: 36045 - DNA, 1186 bp, Mus musculus
ccattgtggacaagaccaggctgctcccctcagcaatctgcagccctgggtggcattatagacaagcaagcaggcaataacagataggatgctgccttcccagaagaggaagaaagtgaggctgtgggagggagggaggaggggtgcccatcacataaagaacaggaagtggggtatcagcaagagatgtggtatctgggattggatctggaggaggaagaggggatgagtgaagggatgtagagataagagagccaggcagagagtagaccacttaccaagagccagcatgtaaagagaccacagaagtgggccatgctgacacgcatacctgtgatcccagctcttgggaggctaaggcaggagaatcagaaatttgaggctattttgacatacggagttcaaggccagccttgtgaggctgtgtgagggatagaaaggtgggaggaaggaggctgtgccttggaaaaccgcacagagccaagccattcagtaggtatggctatgctgtgaggcaagactgagaagtggacaagggctcctgggaagtgcctgtctgagtttaatttccagcgtgctgaagagccaggaagcagctctaagcaagagagtgataagacgtgctgggcagtctttttggcttagcctggcaatggcaaggagaccagtttgtaagggacccgcacaagtggccatcctggtcatgccagggatatcatagtggcttagttcagggtggtagaaccaaggaagtggcttatgttttgggagaagctaaagcacttcctgatggaattcaggtggggaaagaatggagggaggagctaaatcatgtccactggacctcagcttgctgttgaggacccaggggtttcagatctgagatctggggaagggatgtgcatgtactttgtcatgcacccagcaccactgaagtgctttgtgggtatgtcacactcattataactgcttctgttaatgcagtctttctgatgggaaaaaggaggcacaggaagattaaataactaccgggaccctggctttgtgctgtattccttcttaagctctgtcattgacagtcataacaaactttatgaggttgtgatgccattcacacaatgcctctttcctgtgagctctgtgagaatacgggacacagtctttgactttgcgtcgcagaaagcct

SEQ ID NO: 36046 - DNA, 1163 bp, Mus musculus
cctggtctataaagcaagttccaagacagctaaggcaacacagagaaaccctgtatcaaaagaacaaaaaccaaaacaaacaaacacccaccttacagggatgtggtcttgtaaagtatcaaatactgaacagtgtaaagcagtgtttctcattctataggtcttgattcctttgggtttcaaatgacccttacacatgagtcaaatatcagagatctcctgaatagcagatatttacataatgattcagaacagtagcaaaattacaactacgaagtagcaacaaaaatagtgaaactgtattaaagggtcacagcattaggaagatgaagaacctctgatacagccttaccatgtatgtatgtgatatatatatatatatatatatatatacatatattcttttctatatctatatagaaagagagaaaaagaaagaaagggaggaaggaaggaaggaaggaaggaaggaaggaaggaaggaaggaagaaagaaagaaagaaagaaagaaagaaagaaagaaagaaagaaagaaagaaagaaagaaaatggtacttttatgttggatatgttttaaatgtgtggcctgaagatgtgtgtgctggaaacctgggcctcagtgtggccatgctgaggtaatagaagcgagacctggaggaagatatttataggtccctgggaatgtgccattacaggagactaccatagttctcttgcgatccccccaattagatcccacgagagcaaactgttataagatcaagtctgaccttcacatctttcagacttcctgtctcaccacatggtctaaccttctctctcatgaggccttcggccatgctgtgatgttgctaaagaagccctcccccaaggcctaacagatgagactgtaagttaaataaactgtcttttttttaaaaatcagtatctgcactttggtaccaaaaccagactaatacggctactgtttcccactgtgcctctttattgaccctgaagctattctgggcccaatgctgctagtggtttcagatggtgggctctttgtctcctgtggtcactgtgagcattactgaagtttgactgagtaagtgaagctttagtcttgaggggaaaggaatctggaatatgttacggtggggtttttttcttcctttccgga

SEQ ID NO: 36047 - DNA, 1176 bp, Mus musculus
caatggaccaacagagtcaacattctccacttcctggaagggagatgctttcacatacatgaccccaagtgccagcagccagggcaatcaagtcagtgaaaatggaaaaaacccttcctcgggcaattcttgggtccctctgaacacactcccacctctggttcctaaggaggcggccacgctctttgtcacccgtgataacccagcaggatgcactgggctacccagctactctgagcaccccactctacgaagacagataccagaaagacctcccaagattggccttcttgcccgtggtacctcaaggctggaaacaggcccaggtgggaccaacaggttccgggagcggtcactgtctgtacccacagactcgggtgttacctcagtggactatgacgaagaacagaagaccagtgagacccgcatcctgccttatgccagtacaagctccgagggcagtaacagtactgacaacattgcagccctcagcactgagcaggaggcacggcacagaaggcaaagatccaaaagtatttcactcaagaaggccaaaaagaagccctctccacccatgcgaagtgtctcactcgtcaaagatgagccagccctcccaccagaaggcgaattggtactgcccaaggaccagaggcctaggagcctttgcctctccttggaacaccaagggcaccacccacctcacccagatgctcaaggtcacccagctgtgccaatgctcaaagatccaggaagtacgcagttctctcaccactggtatcttactgactggaagtctggtgacacctaccagtccttgtccagctccagcactgccaccggcaccacggtcattgagtgcactcaagttcagggaagctcagagtctctggcctccccttccacctccagagcgacaacaccctcccagctctccattgaggtggaagccagggaagtagcctctcctgggaggcccactggactgatgtccccttccagtggttactccagccagtcagagacacccacacccactgtctccatgtccttgaccctgggccacttacctcctccaagtgctagtgtcagagtacgtccagtggtaccagaaaggaagtcatcactgcccccaacatcaccaatggagaaaatctgcaagtcacggttatcatttga

SEQ ID NO: 36048 - DNA, 1102 bp, Mus musculus
atccgactcaaacaggtcccatcccccgccccccactgggtgaggataattgctttaccgtgctctcagtatcttgagttttttaattatgtatttataacaaggggggctggggaatatatagctcagtgccagagagcttacctagtgtctgcaaggtcctgagttccgtccccagcgctattgttttaaataagtaaataaacaagaaaacacgctcagaccacctgttgtaatgaaaagcatacacgagaacagggatctggactggtcttcaccatgtgggcattgaatggcctgagggtaaattattaaccttcagatctccatgttcctcctcgacaaatggagccatcaaagcctctgtcctgctgtccatccagagttgctttgaacatcaagggaaataatgaaattgtatgtgctttgtcctggctatcatggtcaaagtcattccttttggttcttatgcctagggaggtcagtggaaccgagtgctgaagagaaaagtttaatcagtgataaaacagccgaatggattgcagaggaggaggatgacgtgtttgtggcttcccgcacaactgaagatttatttactgtgatacacaggtcaggatcattttccttcattgtaattgtaattgctttccccttctctacttaaagaaaaactgctgcctctgagcagccattagaattgcaagtgaacattaagtccaggtacctacatttgtgagcagtctggggcctcacatctcaaattcactgatgtctttgagtgaaggggaggaggggaggaccaggtgctgagagaggcccctcgtctcctagcaactgcttggcctattgtgtctccatctgctccctcacagctctgtctgcagtcagagatgtttaacccttcacagaattccttgtaccacagaattctatctcagggtgacatggagccctgggctgaatatgagagcagggacgtaggcagagagggatcaggggtgggcacaggggcatgacacaggggttcgtgagcccagttactggtgtggcacaccagttttcaaaccagtttcaaaaccctctggctgccttaattcattca

SEQ ID NO: 36049 - DNA, 1480 bp, Mus musculus
tggggcagagacttcacagtcagagaaaagacttaggcctgggaatgtccattcagtgtttgcaggagtggacctagtcctaaagaaaccagactattggggaaaagatttaccactcattgatcagcacaccaccaagcatctttctaatacttaaccttctcttattcaactctcttccctgggtacaatgtatgctgccggtgaggatgggggaaagttgaggagaaactcttttcagggaggttctctgggaagttgcttccagagtgatctctataggtagaatagacagtaagttggagggaactcaaattggccccaggtagtcagcctctgcttcaagctatttgtattcccctgtttccctccagcttcaatctttagtggtaggtggctctgttagagtgaatatagacaaaggttggcaagacgcccccccccatccccaccccaagatgcaattaatgctttgtacttggtgggtattgatttgtggttcaaatgtgagtggtggagagcaggctagtcttagtacaaaggctgactttgcttgtggctcctcccctttgcctgtactcctggcctgcatgggcctccaacttgtcctccagtcctaacacccgtgaactgcactggtaccaacagctcagccacaaaggagtcaaggccatgggcagccaatccattcctgttagcttcatgaccccaaggttaaggttctgccaacaagcattctgcctgacatctactttatctagacaacccagatccagttgtctccgtaccttgtcactctgagcagatctacccatgcacctgtccacccccctcctcctcacctttgaaccagtcaggaaaaaaaaaaaaaaagactagttatctatcaatcactcagtgctctgttgctcactgctccgccctctatgttagccaagtctgtggcacaatggtgagcttttcctttgctatgatttgccagggccaggactagggtgaggcgattggggagacgcccactctcaaggcccccgccagtgccttacccttgccttggccctgcgatttgcactctgtaaagttgtatcggttactcttcctgagtgtagttgtgatttggggggcaggttctgcaccaaatgtttctttgctgtttctccatttgttgccagaagcctttgtatgcctaagcattagagaatcttaagtattatcacaagcatgtctaaatggcctgctccagctggcaaatgagcaccccggtcaggaggaacactatggcctgagcccttcaacagtcagttgggggtctgcccctgtgaccttctgtctgttctttctgcttcattctcccttgtagtccttgtggcccagcaccgattctcctcagtgcctcctactttgttctcctcctaagaagaaaacatgctctcaggaaagggatggattcgtttgctttgagaccgggaggcttaatgct

SEQ ID NO: 36050 - DNA, 1225 bp, Mus musculus
gggaccaacctccctcttttcatagaggaaattaaggcccagaagagtcaagtggctcactgaaggtcacacaatgagtctgaggcagggcccagcatcaattctaggtccctggtctctgggatgaatgtcttgtcatttaaagcactatatttatgaaggacccatgactggcttctacttgtctgacattaatttcccgggtatttcagtgaaaaaaaattctatatgctttaagggaacatgcgcaagcgttctttagtttatgaatccaaagaaaatctggtttttagtttagaaatgcatctccctccatgtttgctatctgtgccctacttcgtacaggggatgtttttcctaagagctatgtagaaaaatggatttatatagaataaatttcatttttagtaggaaagcttccctatgtaagggaatcttctaggggattcttttggaaaaacaaaacttttcttgtcatttgttctttaaggtctttaattctttattagtgtgaatttttgtacttgctgtttagttaaagtagggcaaagcagtgttagctttcccagaatttactagaaccttaccttcctcatctttttgtgaaatcttcagactgtggcatgcttatgaactactcaattatgttctagaaacttcacctcgcttgatattttaccaatccctgggctcaaaattcctccttgatctgatcagatactaacagagctccctaatcagtactcatctctacatgtggtctcttttccagaacattctttgccagtattccttagtgtgctcttcctttagccatctcaggcctccttccataaatcacacatacctcactgtcctatggaccagcaggcactataccttgagggttatgctatgatgctgaggaatatttcctgttacttccatgttctcattccccttggatcttctctggcttccaggctcaatgaacttatctcaccagagactgatggtttggtttttttttgggggggggttggttttgttgttgttgttactgttgttgtttgttttttccattgtttcaggaaatcaataaacttttttctacaaagggcctgggagtaactattttaggtttttgtgggtcacgtatgatttctggaacagattctttttttgtgtctatagttgtttgttcattcacttgtttttacaaccttaggaacataagaaaaccatt

SEQ ID NO: 36051 - DNA, 1791 bp, Mus musculus
gatgaagaatcagaagtgattagtgtgaaaaccaaaagcaaaactagaaggatcctctcagatgatgaagatgaagatgaagaagatgcttttaaaggtagtcatacaaattcaattaacatctctccctttccattctcatctgtgaaacaatttgatgcttcaactccccaaagtggcagcaatccatctcgaaggttcttttcacctaaaacaccaggtgaagtgaatacgtccttacattctaggaggtccctggcttctaggaggtctctgatcaatgtggttttagatgatgtggaagatatggaggaaaggcttgataacagcagcgaggaggagagtgagccagggctttcagaagagaacaatgaagaagaagccttagcctgcacagaagagcagccttctggggcaacactggcttcaggaaacaagtccagcaacttgaccatgtctgagcctacttctccagccccacaaagctctccctgtgctcctgaaccttcgtcaagtgaccctatgcctgatcctccccaggatctggcagtggaggctggtaatgactatgagagtcttgtagctcgtgggaaagaactgaaagagtgcgggaagatacaggaggctctcaactgcttagttaaagcacttgatataaaaagtgcagatcctgaggtcatgctcatgactttaagtttgtataagcagctgaacatttgagaactttatagcctatttcttatgtctaaaatgcaattgaatataaatgttttgttcagcagttcttcccttgaatatttcattttttcccctttaggcatactttgcaaactttcagaagtgttacctaaagttttgtgaagctgttctggctatttttactgtgaaaagggccattttgtctgttagctcagttctgaaaattaaagtgccttttctccagagtgtttccattcattttctttcacaaggtggtagacagaaactctttagttccaataagctcgtcatttagcattccaaatctaagatagccttaataatgtgccgtttgtgcttccagcttagctgcatacagtacctgtactagcattcttgggcacttgtagcctgccctggagttgctctaccaactggttagctattcttcacttactctggactatgcttttcttcaacccagttatgtggtgtgtgtgtgtgtgtggggggggtgttcttcagttttttgagacaaagttttacatagctctggctggcctggaactcagggagatagctccacctgcctctgcctccctggagctgggattaaggatgtataacactatgtcccacttatactggtgtttggatgctatcacatcctctcttttgattgttgactacataagaatccgattcaccttcagaaacaccaagtgcagcatatgctgtcaccaaagatttagtgtttacaatgtgcctactggatattgagtatatcacacaggcctcttgtttaatccttaccataacctttgaggtggagggtggtgtttttgtgtttgaactgaaacatctaagactcactgtgacctgcccatgatgaatgacatagtaaggcataaaactgacttaactttgtactgaatgaaaagcaactttgtaacactgagttcattttactttcatcaccatgacacccagtgtggtggtggaagtccataccagaacacttctctggacaccaaccagtgacctgcaattcagtttggacacaacccagagttagtgggagactacaagttt

SEQ ID NO: 36052 - DNA, 1105 bp, Mus musculus
aaagacgacagtgctgagcatctttggagttaatagaaccaatgagccatagcagtttgattcatgagcagtgctagtaatggaataaatcttactagcttgtgggtatttttcttagaaataaatgatcatgtggtgttaagtatgaagggtactgttgtccatatatagaatagccacagcaaccacagctggtgatatatatacactgtggtatgagtctcaggaccacctgcccagcagccaccatgactttggatctaagaaataaagtgacaattgtgtcctgtgccatcctgctaatggggttttcttcattctttttctagggtaacaaaccatggatctctcttcccagaggaaaaggaatccgcctcaccattgctgaagagagagacaagaggcttgcggccaaacagagcagtgggtgaaatggtctctaggagacatgctggaaaagtgtttgtacaagcctttctaggcaacatacatgctagattaaacagcatggtgaaactacttttggtttgctgttgcttttttttttttttctcaaacataatttgttgatgttttttggacataaatactcgggttcatttagatcatgtagtgcctagcaagtcctaggtgtttctaatgaatttgacttctatcactgggcttatgctctttgtaagtggactgagtgcttagtcctggctggtgtagaacctgggagtgagtcttctgcatttagaatgctattataggttgagctaccatacctagcctcttttgccttttagcaaaagacagccttattattcccaactggttgtcacatacccaccaccccctcccaaacaaacccatgtagagtgaatatacaaagtcttgaacgtataccaaaaaaaaagtgtctcccccaacccacccctaatgcactggtatgaagctgggtggcctgtctcaagaagtggtaggttttgttcatcacttggcctgctctgaaattttatcagtctctcccaagagttattgccttgatttgtttgtctctgggggcctccttctggcttgatttgtaaaatcttaagcatgtgtcagcagtgaggctgacaaa

SEQ ID NO: 36053 - DNA, 1241 bp, Mus musculus
tcaatattgcccacattttgttaattgggaaagttcgaaagtcagttcattgaaggatttacgccgtaggctttgctggaaagacctgaaacaatgtaacaacgttactttgaaaacttcttccaggctcgtggtcccaagaaacacctgaagcgtgtagctgctccaaaacattggatgctggataagttgactggcgtgtttgtaagtattgtggtgtgaaaggtagacatacctttaacaagcatatttgtggagttgaatgtagagaatctttggctgtcttaaagacctgtgtcctacctcaattttgatacatctgtttcatctactccatgtattccatagtacactgatggtggatacatagactcaggtctcaaagtagcaggcctcattctttggaggagaaaatgttgaggaatcttctagcgaccccccccccatgtaaaataacccaagttttggtgtagtaattttcctaaaactttccaggctcctcgtccatccactggtcctcacaagctgagggaatgcctgcctctcatcattttcctaaggaacagacttaagtatgccctgactggagatgaagtaaaaaagatttgcatgcagcgattcattaagattgatgggaaagtcaggaccgatataacctaccctgctgggtttatgggtgagtaatcaggatcggtagtggccacaggcccttaactcccaatagtggcaggtgactgggaaagtgccaggctttcctggtcttcgtcttcacccctaccctggcacggtaatatggagaggtttggctactgggcttttattcctttttaaattttgaatttcttgctactctcccatacagacctactggatcagaatctctgttgggctgttacttaaatattgtggggatagcttctgaaacccaaattcccatttaaagtttatgtggagtcttgataaaatgggctcacacacacacatcccccagctcagttaggagtgtagtgagggttgctgtggtaaccttattctttgatatcagatgtcatcagcattgacaagaccggagagaacttccgtctgatctatgacaccaagggtcgctttgctgttcatcgtattacaccggaggaggccaaggttggtgtggcaagcgggctgggtagtttcctctaaaattagtttctaagttagatcatggaagtgagagatgagtcaacagatttcattagaattgt

SEQ ID NO: 36054 - DNA, 1160 bp, Mus musculus
tccacagtccctgtctcagttttaggaaggtgacatcgggtttgtcagagtggattattggagaggctgttaatctctttcagacagtgatgaaaagtagcgaactaaagttgcagcacgaaatttactctgtaaacatttcaaacaatcctcagccttagcaccattagctaatgtagctgggtggtggtcttgcctgctattgaatgtatagtttacctctatttaaatatttaaatgatatttgcagtttgaaaacttaaaagagttcagactcttagcgccaaaacttgaaaccacgtttttttagtgtttagctgtgtttctttctgttaccatactcctttaaaactacatctcccagcatgctttggagctggtctgacctcatttcaaatggccccgtagggcaacaaggctggttacttttgaccgtgctacttgtgccatgaaaaaattgatcccaattggcagttatttggtttttatatctgtcaggcaccttttttgaactgtggtcatcagtagaaggcatctggtctggaagggcccatccatccctgtagttggacgagggaccagggaaactgtctccggcgatctaaataggagggaatgttgacaagggagcaccgctggggctgaacagaggagcaggaactggagctcaggctgagtctgaaaactgttggctccagactttggctcgcggacggttggaagtgggagatggagatgccagaggaacccgccaacagtgggcattcactacccccggtttatatttacagtcccgagtatgtcagcatctgcgactcccttgtgaaggtccccaaacgggtaagagaggtctggatcaaagaccacggtttgcggggatgggggtgggagggtgtgaaagggagtacattaggaaacgagaaaactggactgaaggataccttcagcaaaaatgtaactagcagtgccaggcacgccaagccgagcagaaggaagtggttcattaccttcagagagcgcagtggggcatccaacgctcgagtgggggcggggggcgggggaggggaaggattggcgcagaggtgagcggagttaccaatagggggtcctggaccacaaactgttaggagagagtattccatcacttgcgttagtaaagc

SEQ ID NO: 36055 - DNA, 2767 bp, Mus musculus
gtgctggggaggaagctcagaggcacactaattagagtttgactcagtaggatcagtaattttccctttcactctgttttcccacccttttaaaccaaatagaaaaccctcggcgcagatgataccatgttggcaaaggatcctgcatctggcatctgtactctcctgtatgacagtgcacccagtggcagatttggcaccatgacctacctctccaaggcagctgccacctacgtgcaggagtttctgccacacagcctctgtgccatgcagtgagggctgtgggttctgcctgttagaacacttcagtagctagcccgtctggttgattgtgcatggaactgacatgttaacacctgatcactcccccaggcccttttcctgccccatccctcctaggaagagagaactttgctgacgatctcactacttttgaagaaaagaagccctatctggagacttgactccagagcgaagccctatctggagacttgactccagagcgaaggttcaactgcgcctgcagtcactatccctacttttgtggttcatagaagtctgcatgtgcgttgattctgtagagctgttagtggcttagtttttaaactcctattggggagtaggtattaataacttattcctgtaagttggttttcttatttgttggtttttacgtgtgtatatgagtggtgggtattgattaggccatcatttcaagagagtagatgctaagttggatttcgtgctgctgtaaattggaactgtcgactctaagtgcctttacttaggaaaagccagtaccacatcatggcttccttcttcactcaaaggctgctttgctctgagtggggaaagagtgggtgttttgtagaagcattgcctttcattgttctttctatatctgtccacaatgcctactgtctctgtggtgaaatattaaaatatgtaagctcacatggaagtttaagaatttctgtgttaatacttggaataacccagagaaaagaagccagaagcctaattccagagaggaagggaaagaagttctgtaggtagtgctttacacatagggggccgagagaacatcagaggcaggtaggttgcttgtggacagccttagacaccaaatccttgcctctggagtgtagccacacacaacacagagagtaactgaagcctatcttaagcaaagagaaaccacccgtccactctggggctgccctactgaatgcccctttccaggaccttggtattccttctcattcagtccccagcacatccggctacccctagctctctccacattcattcctcaagtctctcatttacatggtttgactttttaattctagtacttacaacctttaatcttggtaactgtggccaaatatctattgttatacatatctctgaatgtgcttgtaagtggttaaataatttgtaagcatttttgatctgtctgtctgtctctacatggatggactgaataagaatgtaaataatatttattgcaaagcaagcctggtcatacttgctgcttgagaagctgaggcaggaggatcatgaattcaaagccagcctgggatacatagcaagtttcagggcagtgtgggtatgaggttgtgtctcaaaaacatttgaaagcatgttgtgcatgtgtgagagagtggcgtggctggtctcaggctgacactcgaagggtagtagaaatatcccttctggcctattgtctgcttcgctgtgtaggtagcctgacttgacagaggtttctcctggttttccttgtttctacccagagaatttcctactcccctttccctccaaatgttaagggttttctcccagaacagtaatggggctaaaggggcagtgagctccaaacagtcacagagtgaggagtcttctgagctccctggctaagtgcagcgtgctagcagacaggcaggggatgcaaacggctgccgggccacctctcccctctcacaaaccatataaacacagggaggggctttctcaccacttctgaggagactgtacagcccgttttgtgcctgtgtgtgtgttcatggcctgtaagtgtaccccaagcactgtgggcgggagctaccacttctttgagaacctctgctttacggttgacactgatgcttatctttctctggagttacggatttgcctgtggatttaatgctcacaccatgctatttaatttttaaagtaacttttcagaaaatattactggcgttttgttcattttaagactgttaacatgaagaaaagtgtgctagaactttttaaaaacacataatgtcttgaagttagaataaacactaagaaatgactatgtctggtgttactgcacaaaagcttatctggtttgtgactgaagctaattcatgattatttcacataacgttttgctatacagtatactcaactgggtcaaataagactaacatttatatactgtacattatcatacatcatatatcatatataaaaaagccacaggtttagtgctatctttagacagactgctcactaaaaacataagatgggtgcttactctatttcaactctatataagtggtatttctaaactattagaaaactaaatagtttgctctcctaagtattctcaatatttcacatattgtttaaaatattcattggcttgaacttggtggtagaagcacatgcctttaatcctaggacttgggaggcagaggcaggtggctctctgtgagtttgaggccagcctggtcta

SEQ ID NO: 36056 - DNA, 1146 bp, Mus musculus
tgtgtatggaatttttccctgaatgtatacctgcaccatattcattcatggtgctcatgaggccataaagagatgttggcattatggatggttgttagctacccaatcctctagaagaatagacagtgctcttaaccactgattatgtttctagcatctctctccctctctctctctcttttttttaacctagatgctagcaaccaacagaactgtgtgcatcccacagatgttagagtctttatctatgaacagcagctctgcaatcaggatggggaaacactgaaacaggattaagaaaagagatgctataccaagcaaactacttgtttaagagtctggctatttaatagagtttggcttattctttccgatatcttttgtttccacatcaatcatttggaaccaaagtttcactttaaaaccaaggtatttagtaacaaaccctattttgctacttttctcttagtctatcctgaattcactactgcccagggcttcaacatccaaagaagttgatgccagtctgctctcagtggtctctttcccagcctttgctgtagaggacagccatttggtggagctcaccaaacaggagatcatcaccaagcttcaggtatggccatgtgtgactttcttctctttagggctgtgacttgaaagggagattctaggggccatgagtgtaaacttatgccaggaacctcccctcttcctaggttacactctcataagtattttttttgtttgtttgtttgtttttacaaattgtcaaaagcttctgcagtcgttacaattgtaagtggtatatccacttaggaaaacagttggtatattcttaggaatttaaacatatatgtaacatgtgatccaacaaacatcctatctatgtactgaggttatccagatcttgatttttaaataatagtcttgataaatggttgatttgaggatcaaactagggatgatacaaaggatcctgaagcatctgaaaattttagaaggtaaaaacttcaaaaggatttgggtgtggctaggcttggtgggacaagcctttaatcccagcatctgagaggcagcatctgttaattcaacagcagcctgcagagtgagttcctggacagccaggacaacacagagagtcag

SEQ ID NO: 36057 - DNA, 1199 bp, Mus musculus
tttcaatgggttccagaggccaaacttctactatgtaatgtcacggccaatgtggcaactcatgaaacagatccagagccatggcttcccgccggaggtggaggagcaggatgatggcactctgcccatgtcttgtgccaggagagcgggatgggccgtcaccctgcagcctgtgcttctgctaggatcaatgtgtagatgccattcttgtagctcttgcctgcaagtttagcttgaattaaggcatttggggggaccatttaacttactgctagtttgggatgtctttgtgagagtagggttggcaccaatgcagtatggaaggctaggagatggggggtcacacttactgtgttcctatggaaacttttaatatttgtattacatggatttttattcacttttcagacatgatactaacgtgtgcccctcagctgctgagcaagcatttgtagcttgtacattggcagaatgggccagaagcttatgttgtgacccattgtgaaaataaagtatcttgaaataactgggcatcggggaatgtttgcaagtatccttaaagaaggcaccaacatctgcacaggctgctgtgtcatggagagacccactgcctgtggatctgaaggttgagctagccccgcatagcacagaggagaggtggatggcacaaggctgtgccctctctgtacaacatcagtctgcttagctcatcccaagtgtgcagttggctgagaattttggtgcccagagtctgttggtgaggaatgtcatctgcctagtgaccagttggcatggccacttcctagggaggtcatctgaagttctttgaaccttcctgcagaaaccctgactgttccctcaacccttgactccatttgcatcaccacctagtaacagttggaagtatcatacagcatcggcagtcaacttcctgtaataaattcaacaacagcaaaaaaaaaaaaaaaaaaaaaaagaatcccccttccactttcatgtcacagatatgctattaccttctttatcctctccttgaatattctttttccccctctaacgggctcttttctaattttcttatctctgcctacactcatgtgtgcatgtgtgtgtgcaagtgcgtgtgcaagtgtgagtgtgtgtgtgggtgtgtgtgtgtgtgtgtgtgtgttaaaaggatccaattatgagattaacct

SEQ ID NO: 36058 - DNA, 1187 bp, Mus musculus
ctatttctttttctttcctctcctctctccctctttctctctccctctttctctccagggtccccagtcaggggctgccccttttccaccctccctcccccccgctgtgtaggtcaggcatgttcacctggggcccagtggaaaagtgtccagcagctctgcctgagtcctcctgcccagagcacaggagctctggctggacgtttggccccttttccttccccttcttccccagggcctccctagggcgccccccttattttgttccaaacaatcctactctagcaactaaacaacacacctgaaagccctagaacaaaaagaagcacacccagtaggagtagatggcaggaaattgtcaaattcagggttgaaatcaacaaaatagaaacaaagagaacaatacaaagaatctgcaaaaccaaaagttggttctttgagaaaatcaacaagacagataaacccctagcaaaactaactaaagggcacagagacagtatccaaattaataaaatcagaaatgaaaagggaaacataacagaaacagaaaattcaggactctaagtgagggaccttagatgaaatgcccaatagtggggggagtgaacttgtagagttcacccccagtgaaaaggcctcagggagtggggaggcctggtggggtggtagaggggtagggacatacccttggagacagggggaggaggaattggatgaggaactgtgggagggcagagtgggaggagggttaccactgtactgtaaaaaataaaagtaataaaaagaaaggcccaaacaaaacaaatgaacaaattttaaataaaataaaaataattcttgtcttcaacatcataaaaaagatatcaaatattattttcgtgtatttatttgctatttttatgtacacacttgaaaagttgtttcctcccacgtccaatttatgtggctatttataaattggaatatttgttctttgggtttgtaataattttagttctttgtatagtctggatactaattcctcttagatgagtttctggcaagaattttctttccttctgtaggctgtctcttcgcactggtaattggttcctttcctgagcagcagaagcctaacttgataagaatcgcaattgtggactactgctagtattttcacagatgtaggtatcatattcagaaattca

SEQ ID NO: 36059 - DNA, 1638 bp, Mus musculus
acatgcagctcagctacagatccttatggaattcctcaaggttgcaaggagaaataagagagaggacatccggtacagtgatgaatagaagtggtgatagctgggcatcctagtcttgatgctgatctcaaagtgaaatcattcgacgtgtcaccattagcaattggagcagatccagaaggaactaagtgttttggaagaggatattaaaagagtggaagaaatgagtggcctctactctcctgtcagtgaagatagcacagtgcctcaatttgaagctccttctccatcacacagtagcattattgattctacagaatatagccaacctccaggtttcagtgggacctctcagacaaagaaacagccttggtataacagcacattagcatcaagacgaaagcgactcactgctcattttgaagacttagagcagtgttatttttctacaaggatgtctcgtatctcagatgacagtagaactgcaagccagttagatgaatttcaagaatgcttgtccaagtttactcgatacaactcagtaagaccgttggccacattgtcttatgctagtgatctctataatggttccagcatagtttctagtattgagtttgaccgggattgtgactattttgcaattgctggagttacaaagaagattaaagtctatgagtatggcacagtcatccaggatgcagtggatattcattaccctgagaatgaaatgacctgcaattccaaaatcagctgtatcagttggagtagttaccataagaacctgctagccagcagtgattatgaaggcactgttatactatgggatggattcacaggacagaggtcaaaggtctatcaggagcatgaaaaaaggtgttggagtgttgactttaatctgatggatcctaaacttctggcttcaggttctgatgatgcaaaagtgaagctgtggtctaccaatttagacaattctgtggcgagcattgaggcaaaggctaacgtgtgctgtgtgaagttcagcccctcctccaggtaccatctggctttcggctgtgcagatcactgtgtccactactacgaccttcgtaacactaaacagccaataatggtattcaagggacaccgaaaagcagtgtcttatgccaagtttgtgagtggtgaagaaattgtctcagcctcaacagacagccaactaaagctgtggaatgtgggaaaaccatactgtctacgttccttcaagggtcatattaatgaaaaaaactttgtaggccttgcttccaatggagattatatagcgtgtggaagtgagaacaactccctctacctgtattataaaggactttctaaaactttgctaacttttaagtttgataccgttaagagtgtattagacaaagatcggaaagaagatgacacaaatgaatttgtcagtgctgtgtgttggcgggcactatcagacggggagtccaatgtgctgattgctgctaacagccagggtacaattaaggtgctagaattggtataaagagtttcctgaagtcaaactgagtttgatcctcccaaaagccatctgcagctgatgatgagaagaaaaagaaatggcatgtaatgtctctcccaacatcatttggatttgtt

SEQ ID NO: 36060 - DNA, 1138 bp, Mus musculus
accctcctctctttcccagagcctcaggttataaccaaagggatagactaaagacaatccagtaccttgcccatttttttcattccttgtcactgtttccatatagctcttttgaaattatgaacatatagtatcagttgaaaacggaatgaatgatactgcatttctgcaaaattccacaggctatagggtggaagatgagccataggtggaggaatcagccatattagagaatctgggaaggcaagaggtgttgaaattttgattcatctactaatttactggctcaggatttgtcaatcactgcagcctggcaaatgagattagagaagagtcctgggagggaaggggtgacgcagcaacctgcatacacttaaaaaaaaagagctgagagacaactgcgtaatcatactgcggcaccagttcctccatccctccgcccccgagtggctggagcagctgcttgcggaggtctgcccactgcggctctctgcagtctctagcctgttccttcagggcctagagtctccgcccagacagccggtttcaattctgctatcccagcttcagcaccgtcttttatccccactgcttgctgcctgccatcagtgcagccgccgccgcctcttggttcatctctgccagatcatcgcgcatctgctgtattggtgagtcttcctgcggaggtcaggtctcctgatctgcgggcttagccaccataagtgcaggcgatcgtttgaaaacaatggctgaatcagtcgaccataaagaactgtctgaatccaaccaagaagagcttggcagccaggtaatggcggaggggcccggggaaagtcaggaccgcagtgaaggtgtctccattgagcctggagatggcgggcaacatggtgaagaaaccgtggctgctggagtaggggaagagggaaaaggtgaagaagctgctgcagggtctggggaagatgctgggaagtgcggaggcactgatgaggactcagactcagaccgtccaaaaggacttatcggttatcttttagataccgatttcgttgaaagtctcccagtgaaagttaagtgccgagtgctagctcttaaaaagcttcaaacaagagctgcccatttggaatccaaattcctgagg

SEQ ID NO: 36061 - DNA, 2230 bp, Mus musculus
tggctgataattattggacagaaaatgttgctgatttagaaaaataccagaatcttttgaggaccatgtcagaaaaacctcagaatcaatatacaactaaggccagcttaccaccaaatttatatttacctgaaggagaggtaccctggggactctctacttcaggtgcaactgttaaaaaaacagacctgcccatgaaatgtctacaaccaaatgaaacatctaatatgtctccttttgaaagtagagggattcccaaaccaagtggtgtaattaagctctggaattccccttttggctacaatgttgtaagttctcaagatcaagcagttactgattcagtaagagctcagaattatcctgtaactgatgccagtcaactccagattctaccagtggacagcattggtatgccctcgactcctaaatttacctatgaatctttacctactgattttgaggctaaaacccatcaaaatccaaattagcacgatatagtaccaccacaaggccagtcttcatcatttaaggccatttcacaacctgtagttgaaattaaaccccaactgaaagctgaatctgagagaactagacacccagacttgaaatgtcatttgtccttatggaaaattatataaacacttatgtcttttcaaaaaaattaaaataaaaacaaattgaaaagcaaattattaattagatcttgttccctattttgtaagttttaagaggattttttttttgaggcttaagaaccattttattagagtttaaaagaaacatagcagggcaggcaacctgaaaatccaggccgattccagaagaaatatggagaaagccacgccttcttgggttagatatgaagtttagtaatggaggctcctaagcagcctcatggcagaagcagaagagggggatacaaataaagcaagagagcccagtacatcaatggggggtggggagggagcccagacattggcaagtattcaaaagatggggaaaagaaacagatgcgttttggaacttaggactccaggaagtgagcagaccacaaggtggaggccccacaggtgactagagccaagacagagtttcggccaaggaaaatacattctctcattaaggagataattgttcctcccatctctttagtatattttaggtcaatcagtgctcctgaggtatggtcctttggccaaataattgacagatctagctggagtaacactcttttcttctttcaatcccttgggtagattctctggggagtgagcaggaaaacgggcagggtagtgctgcttaagccccactcagtcgtcctccagcaggttgatcttggtggggtcaaaatagttggactccatgatggggaggccactggcctcttggtgtttcaccagcatcgcagcttcccggcgggcccactcgatcatcttatagtttggcacataagccacaaaggtagtgccaaggaccagggcgatggaaaaaccaaagaagaagactgcgtgcatattcaaggcatccaccttcgggtagtcgtcgtaaccatgtggaagtctgggttcttcaagtacacgttttcgtccttgggtcctccatccactgcacggtcggttcttcctgctccttttgggccgcagcggactgggcgaccacagccctggaggagctggatttccagcaaagtggggcagcctggagccgtcgaattgcggaaaggctgcgagcgcacaaacttaaccgccaggccgccatgacagctgcagtggtggggcaagaggattctttttacaggtggatcaatttaatggtttgaaagcttttcatgttgaaaattattccaagttaattgaagaatcacacagtttaaaactaccaccaggagcttgagagatggctcagcagttaagagctcttggcagctcttccagaggttccaagttcaattctcagccaccacatggtgactcataacagtctgtaatgagatctgatgccctcttctggcatgcagctgtacatgcagatagagcacttcacatacataaaaaaaatcttaaaaaattcataaaaaagttagctgtgctacatttttcctaagttgtaaaatttttgaaaaactgttgttcaacataatcagaatattaacatagatacaactcatccgttttatttataatttttatgtttgtactcatttgtatatatattttgcaattttcaatgc

SEQ ID NO: 36062 - DNA, 1197 bp, Mus musculus
ttattatccaggactgttttagctgttctgggtttttttgtgtttccaaatgaagctgagaattattcttgcaagatctgtgaagaattgtgttggagctttgatggaaagtacattgaatttatacattgcttttggtaagatgaccattttcactatattaatcctacctatgcatgagcgtgggaaatctttccatcttctgatatcttctctcatttatttcttcaatgtcttaaagtttttattatacaagtctttcacttgcttggttagaattatctcaaattatttttcttttgaagctattgtgaaaggcattgtttccctggtttccttctcaatctctctgccatttgtatataggaaggctactgatttttttttttttttcagagaccgggtttctctgtgtagccctggctgccctgaaactcactctgtagagcaggctggccttgaactcagaaatccacctgcctctgcctcccaagtgctgggattaaaggtgtgcaccaccacagcccagcaggctactggtttttatttttagatttgtatcctgatactttgctgaaagtgtttatcagctgtagaagtttttcttcatggagtttggggtctttagtatgtaaaatagtatcatcagcaaataaagatactttgacttcatcctttccaatttgtatcctcttgatctccttcagaatctttctctagctaagattccaagtagtatattagatatatagagagtggacagctttgtcatgtttctgattttagtgggaatgctttgagtttctttccatttaatttgacgttgactataggcttgctgtaaattgtctttgttatgtttatgtgtgtatcctttgtaaccctagtctttccaggatttttaccatgaaggcatgttgaattttgtcaaaggccttttctgcttttaatgaaatgaccatgtgtttttttgtgtttcagcctgtttatgtggtggattacatttatcaatttatgtatgttaagccatctctagatatctctgatgaggctgacttagtcataagggaaattaagttctctttcatattgaatctttatgtggtttgggtatcagggtagctgtgctctcataaaagaaataggcaatgttccttatgtttctatattgctgaataatttgagtagatttgatgt

SEQ ID NO: 36063 - DNA, 1157 bp, Mus musculus
gctatgtcaattgcacaatgcattaatcctagaaaatactataccgccatctagtggtcacctggttcagaataaaggaaccaacacagcttcagactatatctccttaaactcctaggtcacaagcttttcccagggctatgcctaatctgaaaagtgaagcaccattggaagaaagaatgtccctctctcacctgtgagggaaggccagcctccattcaaggacttggtcaaacatgaaaaagataaaatgcccttaactttgttcctggactatgaggagcttagtgagtcaagaaacctttatctctttgaggactggtgaggccacaggaaaagctcttgtattcactacttctgtggataagccttcattgtatctgggatactgtcagtgtatctgggaccacaattacattccttattgacatgggagagactattttttcctggatgatcttctcgtatttgactacccagtctctaggcatccttactgttactaatggcaagccctagcaagcttacttaacattgatcttaagctgtatgataaacaccatctttccacttattcctttctgagcctacctttgtcctccatcttactgttctattgttctgcagtgacaccatgacaaggtaacctctaagagaaaacatttaattggggctgccttacagttttagagggctagttcacgatcatcctgggaagcggacagatatggcagtggaacagtagctgagagctttataccctgattatcaggaagtgggtaaaagagactgagactggtgtactgtgggattctgagacctcaaagcccaccttcaattatgtacctctttcaataaggtcacacctactccaggaacagacctcctaatcctttaaaaacagttctattaataactaaggaccaaacattcaaacatacagacctatgggacattctcaggtaatatttatccttctcaggtctctgatggggttgaatatagttatagtctcacatataaattatgttgtttaggatttaagaaaatggtttaaggtctaaaaagatgtttgtagtttgatatgttaaagttatgatagaaaatgatttaggtatagaactttgaactcaccaagatagaataggtagtagagt

SEQ ID NO: 36064 - DNA, 1225 bp, Mus musculus
ggtgatggtgtctcttcacagcaataaaaccctaagacaagtgttaattccagtttagaagtcagccactgtgtctcttccatcacggccacttcgtgggaaacactaagagacaaatctaatgaagagaactctttaatgcaataattgaagttttattcagcaagtgctggaactcttgtgtagcaagctaaactgtacaccagagccttgtaatacagaggagatgcctagaaagttcacatgaaagatctgtgagaataactgtgctgttatttcctcccaacagtatatgccacttctcatgcatcaaacgtactctttgttgggagtagagatcagaggtcacgtttggatgaagtcaaggtcccattctcactggtggctaaaccagatttcactctctaactcagtctaggagggaactataatcccattgcgttctgttttgtaagacttcctagcaatatcccgtgggttaaagctgggtgttctgtctgacaatcatatctaatcccatgagtctgatccctgggacctggtatttagaagatgttatgttacaattttgagaagctattttccagaaagaagaggtattataagtggaaaataaacagactttgcctctgcactcaggagagttggagcatctgcccatggatatctcagattccatccaaaataagatatttaagcccagaccttgttggcttaaatgcagtttctcttccaagtagtggtggaggaatattcctggaaaatccattctgcatttcttacccatttctctaaccctgaaatttacttccttaggcctttctcctcttcctgaaataataggctgactttttgttttattccagctagggaggcctttccttcctttcctttccttcctcccttccttccttccttccttccttccttccttccttccttccttccttccttccttccttccttccttccttcctccctccctccctctctccctccctccctccctccctccctccctccctcccccttccttccttccttccttccttccttccttccttccttccttccttcctttctttcttttctataagatattttcttcaattacatttcaaatgctatcccgaaactcccctatactctccccctaccctgatcctcaacccacccactcccacttcctggccctagcagtcccctgtactggggaatatgatct

SEQ ID NO: 36065 - DNA, 1227 bp, Mus musculus
gtgtaacagaagatatgataagcagttagctgaaggtgggagtgctctgtgcaagtaatcaagcaaatagtttaacaaaatctaagatatccagttatctggaggatggtggtttagcagaagccaaggtcagtagttacctggagctttgcaaaagcaagcagtttagcagaagctaagataagctaacttgggaatcttgtccttgggttcttagaatagagttagctattttacacagggcttctcatcaaagagattaaattctggtcaaacctaaaatgttctcaggaagaatataggatctaggaacctttgcaatgtcttacctttaaagaaagcagactggctttctctggtggtttctctggtactaattatgaagaattaaaaggtgtggccttgatagagtgggtgtgggcctgttggaagaagtttgtcatgggtgtgtgtttgttgaggggggagctttgaggtttcaaatgcttaagccaggtccagtgtcactctttcttcctgtatgtgagtatactgcagctgtcttcagacattaggacctggggaggtggctcagtgattaaaagcactgtctgctcttccagaggtcctcggttcaattctaagcaaccacatggtggctcataactatctataatagaatgtgatgccctcttttaatatgtctgaatacagctacagtatactcatatacattaaaaaaataaatcttttaaaaaaatcattgaaaaaaggagaactcttatttatactcccttgcttaggatcttttctccctaaccaccattttgtagcatttgcaatctcacagtggtggggcaatccctagaacaggagcagccttttttttttttttaaaggagccagatcttgtttcccagagaagtctgagttctactggttcctcttcagtaactcctttcagaggctgacacctaactgctgtagggatgggagtgataactactctctggatatgtactgttacgaggaggtgctgttttacggtatatcttagggtttcactcttctgaagagacaccataaccaaggcaactcttacaaggacaccatttaattggggctggtttacaggttcagagattcggtctattatcatcaaggtgggaacatggcagcatccaggcaggcatggtacaggaggagctgggagttctacatcttcatctgaaggctgctagacaaata

SEQ ID NO: 36066 - DNA, 1139 bp, Mus musculus
cgcttggccacttggagaagggagctgcttcaaaaaaggtgtctagatggagcctatactctactcagaacagaggcagactcaggcctaactagatccctgcacaggagcagatcagagttcaagaaacccaaaccttggtctgcggggggggggggggggggtggggggggtgttagcctaacaaattgtacaaaactgccacctggtggcctgaagtggtcttaccagtactggaattaaagagagacattaaaaaatcttgggatgtgtgtgcgtgcgctcgtgcacacgtgtgggtgaatgatgcatgcacatgcaaacaaatatggatgtcaagtgccttactctatcactatctatattattttacaaagcagactctccttgaatgtggggctcaccaattggcttagactggctagccaagcaagctcttgcgatttcctgtctttacctccagtgctgggattacatatgtgcgttgctatttttagcttaaaaatattttatgtgtattggtgttttgccttcatgcgtgagtgtcggattccttggaactggagactggagttgcagacagttggtgagcggccatgtgcgtgtggaaaaccaccatgttttgatcccaggtcccccggaagaacaccgctgagtcatggcttcagcccctagtcttgagtcaggtcctcatgcttctgcagcaagcactttacccactgagtcatcttacaagctctttggatgattttaaaaattaactaatttattaactaattaactaagtaattaactttacatcctgattgcagcttcctctccctcctcacctctcctcccctactcctcagaaaaggggaggtctctctttgtatgatttttatatgcagattcatgtctcatatcttggagccatgtttatgggtgagcagaatagcagataccaataaagtttataagacactgagtgatagatgcactgtggactgaaacacattgagcccttatatgaacgggtccatcagtgctcttgcctcatggagtacccgcgaggtctcttttcttttcctagatcacatttccaactgcccttttcttctcttttgaatctggaaattccacgtggtatctggctgtta

SEQ ID NO: 36067 - DNA, 1167 bp, Mus musculus
gggctaaggctcctaagataaaggcttctagaagcaacaaccctgctattttagttttattttattctatttcttcctcctgccttcatgttgttttggatatttgagacagggattctctgtgtagccctggctatcctggatcttgctctgtagaccaggctggcctcgaacttagagatccatctgtctctcatcctaagtgctgggattaaaggtataagcaccactgcccggctagttcctattgatgacctttattataagaaacatcccaccaacagcaataagatagatgattttttttctttttcttttctttggatatttcattatttacatttcaaatgttttcctctatccaggtctcccttttggaacacccccccccccgcctctatgagggtgctcccccacccacccacccactcccatcttccccctacacaagggcatcaaaccccctcaggcccaagggcctctcctcccactgacttccaacaaggccatccactgccacatatgcggccaacgccatttgtccctccatgggtattctttggttggtggtccagtccctgggagctccgtgggagggggagatcctactctgttgacactgttgatccctccatggggattaaaaaacccctcagctccttcagtcccttctccaactcctccattgccacccccccccccccccccgtgcactcagtccacctctgtatttgtcaggctctggcagagcctctcaggagacagccatcattttagggaactcttaagatatggcatcgttctgttagaaataaacattttttaaaaaaataagtactctctggtgccacgttacttaattgtgtttaaccatccacagttgtgtattttatttaattatttttgatatatatatttctccctttcctccctccaaaccctcccatatacatctcccatatccactttcccactactttaacttcatggcccttccccccattgtttttgcatgcatatatgcattgcattgccctttttatatttttgcaatgagttttagtacatcatgagtaaatagactaaatgtatcatgacttttaagttttaaagatttatttattttttaattggctattttatttatttacatttcaaatgttatcc

SEQ ID NO: 36068 - DNA, 1099 bp, Mus musculus
agtgcatttttgaagcttccctgaacacctttcttgctttaaaatgcaaatgagagataacattagaggtacaagagaaagttcaagatttttaaactaaaaaacaaagcaaaaccaaccaaacaaacaaaaacaatctttttttttccttagatcaaaaagtttaggggcagggaaccaaagaagaaatacaataaccctagtaccatatgctaactaaccagtttctatattcaggaccagaaaaccctgacagctcagctaggtaacttaaagctgcatgctgcacatttcttgcaatgtttccttagtaatcagggactcacctatcaatggcttgaggtgggaggaaaggggaaggagaaggaagtgatcatctattgtagaatttgctttatttgctttcctacttttattattttgagcacctttaatacaagtaagtgtgtgtgtatgtgtgtatatttaaactttattataaaaatattgcaaataaaatgtcacacactgaaattagccagactcaaagacccaatgaacatctgtacactgagagcagccatttcaaaccaaagtcgcagagtttcacattggattatatattttcactgttgaatctatgttatgcacctattcaccaccaaaacagcagaaacaaccgtgacagaattggaactagaaaaacaattagctttatgtccccttcataactcgtggccattgcctgtgttcaatctttcctcaacccataacatttagcctttcttgttcactttttcttcatgttaaatcgtccccacatgtacatttgttatgtagatattatttcctagattctgaatacaagggagaatatgtgggctttttttctgagattgtgtgacatagtataaattctaattccatcaatttttttttgcaaattttgtgagcacatctttgtttttctttttttataaccttctatcattatttctacatttgtggcactgctcagttcttcatgctgcccattagcccttcaataaaggttcaccctaactattgaccaggagctcaagtcagttttcttactataaaacagagctgttgagtctca

SEQ ID NO: 36069 - DNA, 1401 bp, Mus musculus
cccttccctcccccaacccctgccaataccctacagaagaatggatatagaaaatgtggttcatttacacaatggaatattactcagctattttttaattggatattttatttatttacatttcaaatgttattccctttccaggtttcccctctgcaaaccccctagctcatctccccttaccccttctatgagggtgctcctccacccacccacccactcccacctcactgccctagcattcctcaacactggggaacatcaaacctttacaggaccaagggcctcccctcccattgatgccagataaggctccttcagctccttcagtccttcccctaacttctacattggggtccccatgcttagtccaatgaatgattggctgcaagcatccgcatctgtatttgccaggtactggcagagcctctcaggagacagctatatcagactcctgtcaccaagcacttcttggcatccataatagtgtctgggcttggtgtttgtgtgtgagatgaatccccaggtagggcagtctctggatgacccttccttcagtctctgttcaaatctttgtccctgcatttcctttagacaggagcaattctgggttaacattttggagatgggtgggtggccccatccctcaaccagggggcatgcttaacctctggatatggtcttgtcagggacaggttctccctcccccttgttgggtatttcagctaatgtcatccccgtgctaatgtcaattagcagtcagccccattgctacacacctctgttcaatttcctaacatctcttccatctcctgacatctcctccatctcctcccatacctgattctgccccactatttagctattaaagaggacatcatgagttttgtagacaaatggatggaactagaaaatatcatcctgagtgaggtaactcagaccaaaaatgacacacatggtatccactcaccaacaagtgaatattagcttttgcaaatagcagattttgtttgtttttaaattttatcttatttatttatacttatgtgtatgtacatgctgtggtatgtatattgaggtcagaggacagctttgtggaatatttttctcttcttccagttttccatgggttctaaatatctaacatagatattagtgttgtggatagccctggggctaattatatttgatttcaattccattttcctgtgaggggttgtgaacaaggaatgagtcagcactcagatgatttcttgtaaacctttttcccaccttaaattttaaaatagagaagaaatgatgattgggaagataaaggggaaggtggagtggaaagaaataaaagaaggaggtttgagagagagagaactcagagaaggaggaagaagaaaagtggagcag

SEQ ID NO: 36070 - DNA, 1096 bp, Mus musculus
taaattcatgcacacaggttgcctctcccctaaggaggggttgaagaggtcagcattggatgtgtatggttagaggtgggtgtatatagctcaatccgtgagaaacaaaggtttaattataaacaggagcagatgttggctttactataagatggcttttaagccaaaatggaagcaggttggctcttcagtagtattttataaatatttcggaggactcaatggctgcctgtagcatacttcttcactttccctcagagagaattgatggatgtctgctgaaatcttgtacatttgtaggtttgttggcacaattgctgtaaactattgcaccatctgctgtgatctatagctctattctgtgagaaagatctattctgtgagaaaagttgtacgaatcatggttgacaagtgccacccaatgtgcatgtccttgaggaagtgggcttgccttgcccacagttctgggagaattcctgctgctttaccggtgtacagatgaccatggattctgcacgcatctggagagagtgatgagtcaacttccctcggtgggagtgcataatgactcttgaaaacaatgttcttctgctatgtactgtgagtcagctaccacttcctctgtcacactctcccctgtgctgaaaagtcaaactgtttaagagcacttgatgctctgtttttaaaaagatttgttaaacttttttttttaaacagtccagactttatccctctcctggtctgccctctgactgttccacatttcactcctcctccatcaccccggtctccaagaggatgctcccatcctcacccccaccccaccagacctccccactccctggggcctccagtctcttgagggttaggtggctcttctctgactcaggccagaccctgcaattctctgctgtatatgagttgggggcctcatatcagctggtgtatgctgtctggttagtggctcagtgtctgagagatcctggggaccaggttagttgagactgctggtcttcctatagggtcaccttcctcctcagcttcttctagcctttccctaattcaaccacaggggtccctgacttctgtccattgt

SEQ ID NO: 36071 - DNA, 2084 bp, Mus musculus
gaatgtattattattatcaatgtattgccaacaattccacatagattttactatgaatgatgtttgtaagcatcctgttgaatgtagagacctttaacatgctgttttgtggcaaagccaaactgagtatgttaaatttcaggtgtggggcggagtgcccttcctaataagtggattaaaattgaaatcattacttcagatcttaggcatcacacctgagaccaagaaccttcttttccatttacttcactgttttccatttctcctccactccacccccatcttacagcctcactagctctcatttcctttcccttctttgaaggtacacaagatttcagtctttaaatgtcttaagagctgggcacataccgttaatcaatcccagcactcagaagacagagagaggccacagatctctttgagttcaagaccaacctggtctacagtatgagttccaggacagcctggtctacagtatgaattctgagacagccagggctacacagggaaaccctgtcttaaaaaaaaaacaaagtgtcttgagatttttgcctcttatgtgaggtatcaaggcctccgtgaaagccatggcttatcctcttctgaagttcctgtatcctacattgagaaagagcacagagaagctctacctacatagtaggctagtcagagttgagaaaacagtttcagccgtctgattggggatcttttttaaacacttataaattattgaggaaagacaagtaaaatttagataaaattgttttcgtttgtaaattggccacattttttgattgatacatgcatatttctctggttttttccataattaaattgagtgatgttactactttgattctactataatttgaaattataatataatataataaatgtttttctatcacattaattcaactgcaagtgaatgcctgtatatgggcattgtttgtaatttgcagtgactgacatacattctattctctttgtccttctattcttaactgcttttaagtaagctcatctcagtgaacggaacaagcttaacaaggtcaagcctttttaaggcacttttaagagttatgcctaatctgaaatccttagtccttggtggaaagaggaaggacatcctgtttgatatgtggctctaatggtttgcacaaaatctttttgagccacccagccaccccagatctctaagttctaatatattatgtatgcctgcaaatatgtctgcctgctgcaaaattgaaggtgtatttttatagataagaaggaagcctttgaaaatgcatacccaatgtcttgttttatagctaaggtcagggaaaaacatatctatgtcttatgtttcagctaatgtcatcagatttatgcttcatactgtggtgttttaataccaaaattgatttccatcataatatagaatttttaattctcactggtaaaaaaattacttgtgaatgtcaatcctcagcaatcttacatttcgtctgtagccttagaatttgaccaaatagtcatcataggaatttttttctgccatgtacaaatcacacttcattttgttcaaaaaaaaaaaatcaagaagtgtaatgaattgtttccatgaaacaaatattaagacaggaatagattgtatatgaaagtgaccaagtatcattcaagttacaatagtatttgtcatttaaaatatttatcattacatgtcatatcaatttgaactcctcactaataactgtattattttattgttcagtatattgattgacaggtgatagttttctcgttacttttcttttttatgtgactggtagtttgagtggggaagaagttccttttcattgaaattagtcacagcaaatgctaacccttcccctccaaacttcttttcttttaacctcaggatagaatgtaacttgtatttttctattgggttagccaagtattttgtgaaagttatttttgactaaaaaagagaataattttgttgatatataatactcctttattaccatggtagtttccaaaggaaaaaaagttttgaaataacattttgccaaagcttctaaatctctata

SEQ ID NO: 36072 - DNA, 2939 bp, Mus musculus
tttacaactatcaaatcattcaggttcccttgagtggtgaactgttgggaaatttttcgtggtaaagaataagtttattaatacttgttcatatactttgtgagctaaaaataatagaagggtatctataagtatatccttccatgtgtgagtgtgtatgtatatatatgtgtgtgtgtgtatatatgtatgtatgtatgtgtataattcttatcttgctccagcttttccactcacctgattctgagccagcctttttattttgatgatggcaacctgagaatatgttccattttctgtgaattttgtcaaagtcagacttaatgaagaaactatctaatattgtggccccaggcaagtggtctaaattatgtgtcagtgttttcctctgtaaaagtagagggttgaaccttgagctagacaggaaatgagaggttagttaccattctgtggttctgagaagccacagaagatctttgctgtgcagtgtgtgaaaatggttattctcggatctgcacttggtggaaactcacagtgccttgcacacagtttgagttcagtttgctggctggctgctagttgatgtgtgttagtgaaaacacactcaaagaacccaatgcctggtagaccttattccctctgtgctgataaaagtgaatgtagtttccctaggaaggaggggctgggatctctgtttgccatgtggaatctgactacgcagttggtatcaggtgtgacattggtatccgcttagactgtgtgaagagttgcaggctcaatttcacatctccttcagtgtctcaccaagttccctgctcaccaaaaggatctatccgaacggacttagaaaattcggtggaaaggaaaatggcatgaaagttcaaacccaagtcacttctggtttcattcctagctctgctgcttaattcctctgtacctcatgtcctcattgctgaagtggggacaatattctggacctacctcacaggggaattgagggtctttttcatgtgtctgtgtgcttagaagctgactaaaagaaatattggatagcatgattatataatttctacgtagatgtgactttcagtctgcattatgttttctttctcagtaacatcctacagagtgttctgactcaatttttttcccaagtcatttttgttgctaatgccctatttgttaaacatgagtgattgtactatattaatacttgatttagggaggaaagcaggtgggtgtaaactagtggccctcaggttagagtagatgaaaaatagcagtggaaagtagccttgagcctttctcaagaatcattaattcacataacactaaaggccacacactgacctatcacattccttctacaccagccaaacaacacatggaatcaccatgcattttgctcatgttctttcctgttctgtctattgacatgcttactgacactgattaaaagctgtgaatggaagtgtgcttgtaattaatagaaatgagaaagctgtccttaagtgtactttaatatatacttgaaaatggggaaggaatttagagatccatataatgaaaatgttaggagccacttttaagaagaactaaaattatttggcctctcaacacattgtgtcctagtcctgaatgattgggggcaagggggagagagagagagagagagagagagagagagaaaataaatgagaattgactagattaagctataaattcagattataatttgccttcagttttggtttgtctctggactctagaactgaactgattcagtggggtgtgtccatgcacacacacacacaggattgcaaatgtacaggattgcagtgttctggtgtcatgttctagcattagtctaagtaacagtttctcagcatctgaaagtagttctatgtgtaaagcctgtatggtaatcaaggcaataagttctcaaatggtccttttactcctgcttctttgatttgcttttatcttggcatagttttcctgcttttctgtttttattgtaagcaaatagttgaaaattgttctaatgccaggactttggaacaagttacaaatgtttgaaattatataatctacaagctagtttgctgtccttggactaattatatataagtgtgaatttctactgcaaggacatccagatagagctggcgttgttctaaagattggattgaaaaatgaaacaacttctccattttggccaaggattcctgttggaacagctttcccagaagagaatcatagtggctatgtctgtcgaaccaagaacattcatgcatcttgtagtgttatgtagcctgtggaatgaattcctcttccccctggagtccaggactgactctcctggaagaactcaacctatatacagctgtgccaaaagaaggctacctgcctctgaaactcccactgctgcttctgtcgttgttcacttgtcagatacaattttattctcaggatgcaaattccaataaagtacaaacccatggtactgagttgaaccgtgtggctttggggcacaccgtctcagtttccttaggttttcatcattataatatcattacttaggggcagatacagtaactcagatggtaaaagtcttgttgcctaggtgacctgagtttgatccccaggacccacatgttagaaggagaaatctaacttctacaagttgtcctctgacctcatataacacacacacacacacacacacacacacacacacacacacaaataaatacctaaatgtaattttttctgagacaaggtttctctgtgtagccctgactgtccttgaactcactctgtagaccaggctggtctctaactaagagatctgcctgcctctgcctcctgagagctgggattaaaaaggaaaggagagtttatttggtttacacttccagatcacaatttgtcatgtt

SEQ ID NO: 36073 - DNA, 1117 bp, Mus musculus
tgggctatcgctaaaatgcctgccaccggggacctgggctatcactaaaatgcctgccgccgccagggacctggggagatcgctaaaatccctgccttataaccaacccctagaggtcgactaaaatgtctgctgggcagagcagaggtgatgaaaatgtctgggatagcgtagagatggttggctaaaatgttacaggtagatatgcaaagcgttcaataagcctggcgtgggtaataaactgcagtctagagcggaaaagaaagttaagggcgtgacttgtagcagggtctagaatccacacactcacatcagggaaagcctcgtgtccgaaaaactctttggaatagtcttaatattttaatattgctcaagccaaattcagcaatactacctcaccgcacgtgtctttttcaggtaagatttttgctctttttttttttttttggtaacaattttcccgccatgtgattatgctaaaaaccaatgggattctacctccgctttagtggggttttctgattgtacgcgtttggattaaagttgatgaaagaatgtggggggggggcacagattcagaaaagtggaaaaattactggtagcgtgtgaagtaaccaagaacgagtaactaagtctgcgataactttctttgagaagccttggaagttgagacctaaaattttggtactgcgttccgtttatttccgaggtacataatgacccgatctctggtatcgttgaaattcgaaaataatctgagtgctttgaaaacccattaagtttctactatctgggacaaggagtattttcggggtgggggtggcgggcaaggcaaaacaattctcagtggttcgtatctgaaaaatcatattcttatttactataggcacggaaaatccctcccggtagtgtttattcagtgtgttcagacgagcaaacaatggcactaaggaatgaatccagtttagaaaggagggaaattaacaatcagctttggttttgatgcggatttggggtgaattttgttttttgttttttttttaatgccttatttctgagacaaggtctcagtaaataacctcaaactcgcaaagctctgcctgccactgccttcagt

SEQ ID NO: 36074 - DNA, 1099 bp, Mus musculus
tttctcctgaacaacttaggctctaagttatgagacctcaaattacccaaggaactggctaggcctgcctggtggtgtaggcctttaatccgagcactcctgagtcagtagcagacagtgctctatggatttagggccagcctaatctacatggacttcaggctagccagatggccagggcaacataaccaatttcattacatagggaattaaaactgaggtatctggtatgataaaagggccactgagttagaaactatcatctgaaaagcaggcttagtggtacaagcctgtaattctaacacaggaggatcaggagctcagagtcattccggctacttagggacttggaggctagcctagttctggctccatgcaaaggaaaaggggaatgtggcagtggttaagataccataatagattcttgtacctgcctcactcacactcgcttgcagtacctgtctatctttctcttcttgccaatcacattgtagatgaggcttttgtggttttgttggctccttgtattagcataaggtgaactgatttaagagcactaactgctcttccaggggatctgaattacattccggctacacacaagatggcgtctgtaacttggtttccttgggatccgacaccctctgctggcctacacgggtataacacccaaacctaatgcatagacaaaactcatgcacattaaataaaatttaaggaaaatatcatatacagcacatgatgttttcaaaacaaagcattttatttaacagcaaactaccccacccactcaaccacccacccacccacccacccacccatccacccacccacacacggactcattgtgacatgttggtaagcaacagttttttttttcaagtcttcaaaacacccaagagtcaacagaagttctgtattccgcatccgttcacaaagtccaggtgttttccatgtgttttttcacagttggtgggaagatgactccagtctttcaacaacagattggtacacagttcatttatgtgatcaaagcagatgatggtaggatgtgcttaattggtagcaatattgatggcagtaactgtgaaaggaaggc

SEQ ID NO: 36075 - DNA, 1112 bp, Mus musculus
attactgaatccagccaatttccactaattaaaagctaatattagtaacacttttgatgcccaattgagttttaatgaaaatgaaaaaaatttgtttgaactcccagacctcttcaacctggctccatcttctctgttccttttcttttgcctgaatgtcctgattgggttactaagtaaagtctagatactttgaaagtatgcgtatgctacaatgaataagcttccttacagcaaattgtgacttcagctctaaggcaacttggataaagagatcacattgacttaatctgtttcattcccatttgactcaaggcttagctgatagccatttagatgaaaatacattttcagaaacatttagcgaattaataccaattttgtggaactgcattaaagtcccaacttagattccagatagacaggctggaccctttccttcactcggcctcctgtcccaccctctgtgagtgaaagaaaaatggaaagggtcaaagcacaggcatttttaatctttttcaagttctttcaatttggtctttcgttcctccagttttctgattgttgtcaattttattattcttaaattttatgcaagaatgttaaacattaatgttattttcatccactggcattattttaccatagcaagccaccttgagtatattatagtaaggagaacatttctaaattactgtgagcattagcatgtaaaaaggtaaaaggtttaacgaacacaggcaaaattggtcaatgtatttcaaagcctgctgcagctcaaaaatggcttgtttgccccaggataatgcaaagtagcctaagattgtggaacttagatggctgtcatccctcctgaccagtagtggtcacagtcatagctaaaatggcctagaaaattgagtttcttagcgtggagggcttctgtaactttagggtcaggcttgctacaaagcccagcttcccactcattgcagtggccggagaagacatgaggatgaggactcacattgcatattacttggggactaaggactaagtcgtgccactacccagaaaagagaccccccccccccatccagcacttccctatgtctatgtttcctttttccatg

SEQ ID NO: 36076 - DNA, 1148 bp, Mus musculus
atacacatatatatggcagtttacaaattataaattaatctcatgcataatttctttagatacacaggacaatgagaatgctctttgcatcccagtgcctagcaagggcactgttttgtaataaatgactgccattcagtatgtactcatcaagtattgaatgcttcatatattcagtggttcacagttacttatttactttattttcacagtataataaatgtggcagaattttaaaagcctggaaattgataccaagtaagaaaatgaattgttacatttatatggtacctccgagttcataaaatgccaacgtacatattattctcaagtgtggacacactgaaatgtacgtctgtgtatctctccagtacccatgaaagagaatatacacatgggagacaatatttagcctccaggtttgagattgaccttatggtcttcccaggctagcctccaatttctgggctcaagtggtcctgttgcttcagctcagagcacatgctaccacacccagcttgttaactgtactcttcccattatgggctaaaaagtacaatgaaaattttgtagagactatgcctattttataggcagctttatttctatagaaaatttgtcttgtcttatactactgaactgctttatagttaagaaagtacccacaaccataatgtgacctgggcaaatgttcttgtattaacatgcccttatcactcaagttttgactgattaaattaagcattggctcattccttatgaatagtatggaatgcaaacattcttatttcatggcagttactcatgaatatttcatgtacccaaaacaatatcggatacatcagaggtagttagtagtcattcatttgcacacatggaacaattgatagctgtataatgctttatttaatgcattcttttgtaaattctagttctgtggtaatgtccccctttgttattcccagtgctgaacatgggtattcagaaattagaaggtgatcagaatagggtaatcaatcacctgcattagtgacctagtttgtagtttaaaatcagtttccatgtgttttctcttctgctacctggtataatataacttactgagcctcaccaaagcagaagaaacacactggccttaagtatatgga

SEQ ID NO: 36077 - DNA, 1136 bp, Mus musculus
cttcccaccacttaatgaaggtgtacattctcaaattcacttgttctacagggttctttgtttacaaactcctaagtctgggtcaagccattggacagcttggaagaaagctcattcttctttttttttcaagacagggtttctctgtgtagccctggctgtcctggaactcactctgtagaccaggctggcctcgaactcagagatccgcctgcctctgcctcccaagtgctgggattaaaggctcgagctaccactgcccggctgaaagctcattcttaatgtatacagttcaggcagcctgaagatggtgatggcgagttggtggctttccattacatgattactgacagtgagggctgggtcaggacactaatttggggaactctttgtattccatcaattatggggaccaaagatggcctccagatggttttgtgtgatggcacctcctaatggacatttcaatcacagacaagctcatgttccagatgtcctactacaaataagtgtgtattttacagtgccgtggaggtcatgtaggactaggttgccatgacagaattggccctgattaatgatctgcctgctcacacaacttgatcatttcaatagggaactgtcagtgatagtgggtttactgtgaatagcagcagtaccagcttcctccaggccactaactggagtctgagtcctaatctctatttaggtccataggaggcaggctgaaagctctaggtgcctaggcaagcctgggggggggggtcactttgcatgtactggggtgggtagccaatggtgctaaggtgagaccgaagctttagctaactgtcttagtgcaccaaacacattctttagcatctcaaaaagctttttttccttgcaaatgtttccttttgaagcagttacttgtacaacaatggtcctagtttcctaaaagactcaatagttctagatgtattatcacctagagagccagacaatgctaagcctttggagttgggggaaacctgctgcgaaggaatttacagtggacttaaaagggttaaagtactagagggtcatttgcacgtacaaaaggcaaatgcaaaaaaatgttaagtgttatggacaaggatgttttttcagctagacca

SEQ ID NO: 36078 - DNA, 1267 bp, Mus musculus
ggactgcatgcattaagtgaaactccatgactctggaagtcagtatggagtgggtatagatgggctatctcagtcttataggctgagtgatgggcactgcattttagcaataggactgcatgcattaagtgaaattccatgactctggaagtcagtatggagtgggtatagatgggctatctcagtcttataggctgagtgatgggcactgcattttagcaataggactgcatgcattaagtgaaattccatgactctggaagtcagtatggagggggtatggggtatagatgggctatctcagtcttataggctgagtgatgggcactgcattttagcaataggactgcatgcattaagtgaaattccatgactctggaagtcagtatggagggggtatagatgggctatctcagtcttataggctgagtgatgggcactgcattttagcaataggaccgtatgcaaagtgaaattctatgactctggaagtcagtatggagggagtatggggtatacatagggatatctcagtcttatagactgagtgatggacactgcattttagcaataggaccgtatgcaaagtgaaattctatgactctggaagtcagtatggagggagtatggggtatacatagggatatctcagtcttatagactgagtgatggacactgcattttagcaatacgattctatgtattaagtgaaattccatgaccctagaagtcagtatggagggggtatggggtataaatgggctatctcagtcttataggctgagttatgggcactgcattttagcaataggactgcatgcattaagtgaaactccatgactctgtaagtcagtatggagggggtatagatgggctatctcagtcttataggctgagtgatgggcactgcattttagcaatacgattctatgcattaagtgaaattccatgactctagaagtcagtatggagggggtatagatgggctgtctcagtcttataggctgagtgatggacactgcattttagcactgaatcaatgaagattcgaatttctctaagtagaagtgggcttgggataggtctgaaagtatctgggcctggggctaggactgggctggggcagggctggactggattgggttggttgggtggggcaggggcaggggcaggggtaggggctggggctggggctggggcaggggctggggcaggggcaggggctggggctggggcaggggctggggctggggctggggcaggggct

SEQ ID NO: 36079 - DNA, 1092 bp, Mus musculus
tttgtgtgtcacatgtcagcttcatgtctgagttagcctggagaggtggcacatgctcttgaatgtgtctaagatggcggaagtcatgtgacctgccctctagtggtttctttcagtgattttttttttggcgggctttagctacttggcgggctttgcccgagggtacacttggtgcattatggtagggtgtggttggtcctaccttgtgccactcgaagctgaggcaaggctaagtggaagtgttggttgccacttgacgtaactcgtcagaaatgggcacaagtgtgaaagtgttggtgtttgcttgacttccagttagaaatgtgcattattgcttggtggccaggatggaattagactgtgatgagtcactgtcccataaggacgtgagtttcgcttggtacttcacgtgtgtctttagtcatcattttttcgaagtgcctgcccaggtcgggagagcgcatgcttgcaattctaacactgaagtgttggatgatgtcggatccgattcgagagaccgaggctgcgggttcttggtcgatgtaaatcattgaaacctcacctattaaaagaaagaaaagtatctaaggccatttcaaggacatttgactcatccgcttgcgttcatagtctcttacagtgctctatacgtggcggtgcaaactaaaactcagcccgttccattcctttgtattgttcagtggctagtctacttacaccttggcctctgatttagccagcactgatctcaagcggttctctaagcctactgggtataagtggtgactttggccagagtcatagtggatcacaaatcactggtgaagaggtagaatcctaccttcttccaaaatctaccccatgactattgctggggttgcattttgatttcaatgaatattttggatgccaacgacacgtctgatagtgtgctttgctagtgtttgaatttaaaaccgaagtgattgttttcaaaatgtatttacgatttgcttacttgttgaattcattttaattacctttagtgaattgttactttggagtccttaaagttttcaataatttttttggcagatgatactcaaatta

SEQ ID NO: 36080 - DNA, 1253 bp, Mus musculus
tccatctaaggagctttgggggaacatttttagttcccctaccaccaagccttatggcttatttaagaaaacatatcaaaattccacgagatttttgacgttttgatatgttctggtaagattttttttttgacatgtcctccatactttttgatatttgtaatattttcagtcaatttttcatttttaaggaatatttctttgttgtgccttttggttgatacttgtgtgtgtatggtggacttacctttctttcattgtttatatattcttgcccatcggggccacggatacctgtgtgtcctccccgccattccatgcccaacggggttttggatacttacctgccttttcattctttttttttcttattatttttttttctaaacttgcccatctgggctgtggatacctgcttttattctttttttcttctccttagcccatcggggccatggatacctgctttttgtaaaaaaaaaaaaaaaaacaaaaaaacctttctcggtccatcgggacctcggatacctgcgtttagtctttttttcccatgcccaacggggcctcggatacctgctgttattatttttttttctttttcttttgcccatcggggctgtggatacctgctttaaattttttttttcacggcccaacggggcgcttggtggatggaaatatggttttgtgagttattgcactacctggaatatctatgcctcttatttgcgtgtactgttgctgctgatcgtttggtgctgtgtgagtgaacctatggcttagaaaaacgactttgctcttaaactgagtgggtgttcagggcgtggagagcccgcgtccgccattatggcttctgcgtgatacggctattctcgagccagttacgccaagaattaggacaccgaggagcacagcggactggataaaagcaaccaattgcgctgcgctagctaaaggctttctttatatgtgcggggttgcgggattcgccttgatttgtggtagcatttgcggggttgtgctagccggaagtagaaagccaaggagtgctcgtattagtgtgcggtgttgcgcggaagccgcagaggactaggggatagggctcagcgtgggtgtggggattgggcagggtgtgtgtgcatatggacccctggcgcggtcccccgtggctttaagggctgctcagaagtctataaaatggcggctcgggggctccacccgaggctcgacagcccaatctttgttctggtgtg

SEQ ID NO: 36081 - DNA, 1108 bp, Mus musculus
ctgtgacaatggatccctaaggagtccagcttctagacattgcccctttggctctgaaggggctgggaaccaattatgttactctttgcaagtttaccaactaattaacatagccaccttaagggttaggaggaaattgcttaacaaggtggaggggggggacttgttgctgagtcaccctgccagaaagaattagacttatattttacggcccacctccctccagattacagctgtgggacccttctggggtagagaatcctgggctgcagcttgcagccttggtgagctggtggtagctgtttgttgtggctcagcttttaaaagcagccccgagaaaggcacattgcagggggagtgcgggggctggggtgtcttactgattttcacattttttccagctttgagctcaaataaccccgggccagaggctacgtgttttgtttttctctccacagttgggtgtccagcattgctgtgaaccgcccctagactaactgtgaagatccattatgaacatctaagaaataggagggggcacgggtgtggggagccgaggaatccatgaataaatgagtattgttgacgtgggcacaggcaagtcaaggaccaacgcctcatttccactgaaagggcaaagttctcacctgtgagtgaggctcagcgagatggcaaagccttccccgggtctgaatatgaatgtggacagtgtgctacaagttctagtgtttacgaatgctggatcagtgtgtgcaagagctagcaaccgcagctccctcttggtcagagcacagtctaagaatggagtcatgggaaaggtattctcagtgcttgtgagaaaccctcgagaatacatgacaagagttttgtgacctcagtttctttaaaaacacagacctgttcttggactgtgtttttgtgcacttcctgaggtctgaggtgtagcagctaagagtgtgtttacttcagctgttgttattcatgtgcttctatggaaaaacgtggttttgccacctctgccttgttcttgtgattgaacaccttactcgtgtgattcctcttagccttcaggatataaatcgcctgatgctctgaataaagttagcca

SEQ ID NO: 36082 - DNA, 1136 bp, Mus musculus
tgagggctgctcccctaagagcacctgcagctcagcctccagcagcagctgcaccatctgcagttggctcacctgccgctgcgccccagatggcccagatggctaccaccgcagccggtgtggctgtgggctctgcagtggggcacaccctgggtcacaccatcactggaggcttcagcggaggtggtagtgctgagcccgcaaagcccgacatcacttaccaggagcctcagggagcccagctgcagaaccagcagtcttttggaccttgctctctagagatcaagcagtttctggagtgtgctcagaaccagagcgatgtcaagctctgtgagggcttcaaagaggtgctgcggcagtgcaggattgcaaatggtttaatctaatcaagaaattcaagctgaagagatgtaacattggttctgtataattgatagtacaagtgtggacccttatatttctaacagttccgttgctttagaatggccatgaaagagatctaactatggatgcttactgaggcttgtatgtagtgttggttactgggcaagtgtttggcctccttggactgtgttgtgattgtgagttaaaaaaataaattggttattctgaaaaaataaagagagagtcgctttgcaaaaaaagtttgacagcattcattccatttctattttatggaatagtttgaggagttattgatggtggtggtggtgctcctcctcctcctcctcctcctcctcctcctcctcctcctcctcctcctctttctccttctcctccttcattcttcaagacagagtctcactgtgtagccctagatgtcctggaacttgctctatagaccaggttgccctccaactcagaaaacttcctgcctctgcctcccaagtgctgggtttaactacttggcctggtgatagttcttttaagggtcttgtgaaacttagcagagaattgatctaggattgaacttttttttttaacttggtagattatttgattattacttcattcttttttttataaagtctgttttagttgtttatctcatcttagttcaattatagcagctaaaaattcattctctttagatcttctaatttggtgcaatttaaatcttaaatgtatatactaat

SEQ ID NO: 36083 - DNA, 1226 bp, Mus musculus
gctggaaggactggcttttggtgcacagcaacttttgtgatgcagagttcaaggactacagaaagaccattgctagaacataaaaaaagattagaaattttgtgaatgaagttggtagggatatagaagtagttaacttaaaagccttaattaatgcttttaagtttaggcaaagagaagacaaaagggtaaatgtgccactgcatctgtctacacagaaataaaaagaataaagggcagggaattgttttagaactctgtcccgtcatttagctccatcggactttccagctggtcaaatttgcctccaaggcactgtttccaaaatcttagtgaccctgcttctttggggaaaggttctacagtaaattcctcgctagcacttgaaatgtggggaaatgcttaatactcatcattagaaaaagacaaagacacacttaaaagttggtctgagccaggcggtggtggcgcacgcctttaatcccagcacttgggaggcagacacaggtggatttctgagttcgaggccagcctggtctacaaagtgagttccaggacagccagggctacacagagaaaccctgtctcgaaaaatcaaaaaaaaaaaaaaaaagttggtctgaggattagataatgtgatgcctaaattagatgatgtatttaaaggttttatccaactgacaacacccattaaacactaaaatagaagatcaaagggggtagggtgaatagtagttttagcttggctaggcacttgaagccaacagtgttggtgtccaaattaaaaatgagacttattggggctggagagatggcttagtgcttaagagcactggctactttttcagaggacctgggctcagttacccccatatggcaactcataaccatctgtaacttcagtttcaggggattggacacccttttctgaactgacggttcctgtatacacatggtgaacataaactctggcacacacatacatgtaaaatattttttccaaagccctcagcatcaccattatgaagtttgaaaatcggtgaaaaggatccagatacctagagcagggtttggtaaatctgggacaattatagacgtcatttttttaaatcctttttttaaagatttctcatatatatgtatatatataggcttctaaggaataaaatattttaagattaaataaaactccagttattggtctgttttgtgtattctggcaatgg

SEQ ID NO: 36084 - DNA, 2702 bp, Mus musculus
accctcactgatattgccttagcagtaaagattatttcaaagtacattctttcatgttttcttctggctttcagtcctacctaagtattaaggaaagtaaattgtaaatatcgtagttgtttacaaaggatatgtactgctcttgcaaggaaataatgtccaaacaaagcttcacttattttttttaatagaagcatatttcactgtttatggcgcttatgtaatacatttttatctttttaaaaagaattgtccatgtaaaagtcagggttcctttatatttgtgagcctccttgtcacctttccctggttttcggatctgcaggatagtcctggttaagtaaaaatacatcccgttttcctcttgataaaatgttccattgtagagggattcattttctatagctcaaaaacagctgcagcacattctaaacacagtgatggacagcaggcacctccctaacctccccaaatgtattactcatctctgaagtattgaagttagagggaactcaatcaggatactggttatgaatgtagatgttgaagctattcaaaaacactggaagtcagtctttacatttctagccttgtttgatctgcatgtggactatttcaagaagcactcgtagacattgggctgtctagaatggatacaagtatttttagtgggagttgctttttttattttggtgtccacagctattctatattactagttgcagctgttaaagatgaggttgttggtgtaggtgtcaggtgtgcaatgaagaacaggaatcttggtttcctcaccagtgtccaaatgcctattcttgagggaacattttcttgcgaaagactttacatttcgttttggatcttcgcactttttctttattacagaaaggttctgtgtttaagacctactttgaacttcatgcagtaatgttgggggattacattgttcaaagcataggggaaagtactaaagcctgattttccttgaatttttaattgttttaatccacttactagtgtaaaggtttgcagtgttttattttattccacacagcttacaatgttgagatttattagtgctgaaaacaaaatttaacatgttaagaatggcaggctgtttgtagtaaccatgcagaataagctgtggtgggaatttggaacattttctctgaaaaagaacatgttagttgcactgccctgacctccatataaatggaggtggctttggtggggagagggagaaggctcacatgctagtgttggaacaggtaattgtcagtttgataacaaaaggttagtgccaggagatgctcggtctctagggcacagttgttagactccatccaagctagggaactggtttgctctgttaccttaagcaatattttgctttgtttttgtttttgtttttttttctcctgggaaaactttgtttctgttccaagtattctctgcttttatcaatgtcttatagttatgaagggttagcatttagcacattttgtatttaaccacctgcttctatgaatgagtctccagataaccatgtgataaagaggtctatgttacaaaatgactgttaaaggccatttctgacagtttgctagaatacagtggcaccttgtggttgactttttttttaacagatggaggatagttcttttgtgaaaggaaataatttgtaatctgccttagctgatttaatgttttttcttactggcttccgtgtcacacgtcttaaccaaaaatatacagtacctggaagccatgttgcagggcacttagattcttggctaatctaagatttttcactctctggaagtattctttctatacctgtgtaacgaggtggagaaggcacatgtgaaggtgtttctttttcccctttagtacagttcaatatgtctaatgcacagtaacagtgttgttattgagttaactagtaaatggttcttctaaaaaatttttttaagtgtatgttgatgtatcatgggaagttaaagtgcaagatctggggaaagaatatttttaagttcagtttaataaaaacagttgtgagctcaatcaatagccaccctttaaattttttagcattgagttacctttcttgaggtaagatcttgctgtgtgctcacagctggcctggaactctgtggaccaggctggctttagatttgtggcagtccttgtgcctctgcctctttcttgaatgttaggaatgcaggtacttagcactcaaattcaccttcattggaacatttctaaaatactatccaacactccaggaagtggcctcctgtaagtcgccatagtttgtatctaaaagcccacagcttagaatagaactaccggggtttttgttttttgtttttttttaagtatcaggtttatgatttttttttcatgtccatgtagatgtctggattcaaatcttaaaaaggttaccaaccactcaaaattacagtgagatacatgggacaatttgctttgggtattttgagagggtcttgttttgtagcccaggctggcctggaattagtgatcctcctgatgactgggattatagttatgtgtcaccccaacccagcaaggatttgtttactgaagtcccacagctgctttataatcatttgggaaagcagctagagatgcgcagtgaaagtgaaccctgtcatacataccactgtgccttgtttcaaggt

SEQ ID NO: 36085 - DNA, 1128 bp, Mus musculus
gaggcccagcttgataaggactcttcaatcttgaagtagtactgtggttactgactgctgtcagctggagatggagtgtcatcagagtggcttcccactaacctgatcctatacattggtagcatagcgcagttttgtcctttattatatttactctgtagttatttcaattgttttagagacttgtaggtggaattgtggactataagtctagtactcctctgcaaagagcttgggcatgagggacattgccgaatctgttttggatttctcaactaccctttcaagaggtaaagataggaaatgacaagaaaagctaagtgtgcattactgtttgggtaataggtaatctctccttaatatggtgtcttacgagtgttgagtgcactatatatgctgctagcatgctgctggaaatttatgaacaaattgtgtgcatggtgagcagaatcttcccataaataaatgcagtaacacaactctgttctgttttttttcaattcaatgtatttgtattaagtattttacctatatgtgcatatatgcatcgtatgtgtgtctgttgcctatgtggccaagggaggatgtcgatcccctggaaccaaagttactgatgtagtgagccattatgtagtgctgggaatcaaatcaggtcttgtgtaagaggaacaagtactctaaactaaggagccatctctatcccctctgccattgttttggttttgctttttgttattgatagtttagcactgtctagcctagaactcgaattctgtctacttctgcctcctgagtgctggaattaaaggtatgttgcactatgccctgtttttttttttaataatgctttgtgtttttaaaagtgagagatgacagacaagcacagctccccatccatctacttgcatatattatatatttaatgaaatttcaacattctacaaaggaaaattcctttttttttttgaaacagggtttctctgagtagcccccacagtcctggcactcactatgtataccaatctggccttgaactctggctcctaagtgctgagattgaaggcatataacaccaccacatgactaagaaaaattcttaacattatatctttgtacataatggtacct

SEQ ID NO: 36086 - DNA, 1107 bp, Mus musculus
gtgtgagacccagtctgaaaaataaaaatataaaagaaagaaggaggatgaggaaggaaggaagaaatgaatgaatgaacaaatgaaagaatcaaggaaggaagggagggagggagggagggagggaggaaggagatactgaaatcattctgcctctttgagagatgcctagttttacagcacaaaagaaaaaggcttgaatgaaaactaaaaggggcctttttgtttttcactcccagggaggtggagagcttcagagtctccactgggatagctgtagcactgactggagtttgctgcctacagagttttgaatgtacttactagactttagtttccatagaactgaatgcacctcttcagtaagtgaaatgctttatggtgctaaagaaaatgattatccccatttttcttcttcgccaagccccttaagcatttaagaaaatttaaagtaaaagcatttagagaccctttttatgaatgtaacctgtttctgtttgacacatgacactgcaactttaaagttaggaaattatttgcctttttcttttagaattaagctttataaataatctgtagagtcaattgaagtataaagcttaaggatcactcttaagacgcctacaaaatcttgtatatttttaagtgtgccaatttgtaacatattttgtaagtgtatatttttcttagaaaagtgctgtgaagtgtctgtatgtgagagttttccttttttctgcaccactatgtgctaataaaaggatatttacttcaaagtttctggttttagaaaccacaatacaaagaaaaaacacttttgttgggaattttgtaacaaaaaatatgttgtgaaagagtgtagtgatcttgtgcaaagaaaatgaacatttgtgagcttcttgctgttttatagaatttcttgtaaattattcttgtaacacctctggttttgttgttcttgttgaaaaaagttttaaatatttgtgactgaatgtatggtgaaactgtcataatgttacctagctgagttttgttattgtttatggaataaataaaagaaaagtttaaaatactgctttagaatcatatgtaacagaattaaaaacattt

SEQ ID NO: 36087 - DNA, 1130 bp, Mus musculus
aaactcatcttgcttggttttaggaatggagtgctttctatgtaaccaaaaagtggaaattaaagaagaaataaagaaaatgttctatgagtataatgtgtttttataaaagtaaatatgggagcagttgtcccagatttttttaaagtatcatgatgttcagctttggagaatggggtaagactggggtaggatagcttgaaactgtttctaacagtttcattgtcagaacttgatcatcagtcctttggagtggatactctttcagttgctcctatggagcccactaggggccaattttagggcatggttcatatctttctccaaagagaactgccattttaaagcacctttttatcggcctgccatgcattgtatgttcttaacatataaactagtgacttgtaaccagtcattttgtattgaaacataacaagaaagtgaatttgaggagtgtgcaatagaccaaggcagagatgttattgtacactatgctctacattgttgagcactttgcattctgttggtcctgcctctgctctcagaattattttcctttctgtcacaacatagtaggccaaacttactggagatctcttattcaaccagctgccttagtggagtgaggaccaatgtatgaaaatagtgttttgccctatcactgatttcttcaactcaaaaaccctggattttccttgatctgaaatttctgactacccccttctaacctctcctttctgagaagctgcatcctattaatgcctcctcattggagtctcatttaatctttactttcctggaaattatatcctcccttgttcttctttcttgacttttatcagtcttagaatttttcttcttgtgtagtattctattcaatatcccaaactgtcaaagtttaagaactacagctagaggctttcttttggaagtttagaggactaccttccctgtcttattcactcaaaatacaaatgcacgagcacatgcacacatagcattgagaaaagactgaaactgctttctcttgaaggtgtgtgataacaggtccaatctcttattgtggtcaggtgctgtactacatggagcagagtgcagatacaatggccccagccaagggtcttcaagac

SEQ ID NO: 36088 - DNA, 1194 bp, Mus musculus
accagtattgttagcagaggagatttcaagacaatgtagcattgactgtcacatggttattattgatctctcttatgcagaactacaaggaaaaagagcaaagaaggaaaaaagaaatatgaaatgtgtactttgaggagaaaaagaacaccagagaatatgataagctcaaagagatatgaagtttttaaaaaggcctgatgctaattgtaataaagggatgccaccctcagggtaagaccccaccagctaattgtataatctgtgaaagagaaatgtccaagggatttccttggtctaaacaacagcaatccaaagtttatgcaaatgtaattcaaaaagggggctgagttccagctgcagcaggtagcagaatttggctacatggttctggatttagagccaagaaggaaacaggaaatgggttgtggagtcttcctccatggtaaaggaacgccacaaagaccagacatgtgacagggtagtcccttcctgaaggccattgcatgaagctgtgaaggtgaaacctggattgtgttggaaacctcaagatgtgggaaagagcagaagcatgccagtgagagctgcataaaggatgtggaaccagctcaagagaaaggagtgtgctacagttaacaaagctggaaggagcaaaagataggaagagccatctaagtcaggatgtagagttaggcctgctgggtttccgaatagctttcatccagtatttcctttctttccatttagaatgtatattctgtgccattgtatgttggaagtatgaaactagctttttgatgttacagggtgttactgttaagagattcccttgagtcacagaagagactttgaactttgcattttgaaacatacctgatactgaaagactatggggacttttgaagtttgattgaatgcattttgaattatgatatggccataagcctatggggagctaggaaatgaaatgtggtgttttgaataagaatgagccccatagtcctccctcttctcagagaagaaagggagagggacatgaagagaggggctatgtgaggggggacctggaggagggggttacaattagcatgtaaaatgagtaaataaattaattagtgaaaaagggctcatatatttggaagtttgtgtcccagttgatagatggtttagaaacaattaggaagggtggccttc

SEQ ID NO: 36089 - DNA, 1212 bp, Mus musculus
aataattttattgacttggcttgcctagctgtgactttacagctagacatgtggtagtatatataagtcttactaatcagatgtatcttttatgtctataaacacatgagggtaaaaaaacaaaatgcctggatttttagtcttctgtttgctttgtaccaagaggcctaagaactatgtctactttatcttctctaatggtgaaataaaacactttcactttttctattaccagaaattttctgctttttggattattcggttttctttactcctcaactgttcagtgccacatctaacaaagcatatggtttttctatcaaaggagcagtcattgctcttaggtatgcagggggaaagcaaaaattacaagggttaaaaaccaatccgttcctttctggtatttaacttctaagtcagcatctttttttttttttttcttaaaaaaaaaaaaacaactgtctggctttccctccttgcctaccctcactcctatacataaatattttctcctttttgtttctcctttcctcctttgctaatattatggatggactgacagctcaaaaatactctaattctttttttttttttttttagccctggctgtcctggaactcactttgtagaccagactggccttgaactcagaaatccgcctgcctctgcctcccaagtgctggcattaaaggcgtgcgccaccactgcccagcaaaaatactctaattctaaggaactagatttgttctttgatatttcattgcccccgtggttttaattaggtgtaaattctcctatgcttgctttgaaacatgcctcaggatcttagtgagattaatgcagggagatgtttctctcttcatggtgcccaggcaacatttattgtcattaaaatagtgtcattcaaatgaggtggctgatattggaaaataaatgcaaggttgtttgttgttctgggtctgagctatggtgaagaggtggaattggaggcaacacttgaaccctgcttatgcagtatgtatctatgtatctatagctcaatagaagactcctgacatgaggacaaagcttctaagactatattagggttggggcatgaagatacctgtctcttctgctttccaagctgagaggaaaatgtgaaaaaaaaaacatgcaaagtagccaatgtactcagaaggaaaaaagtgggtatcttctgagccctgggta

SEQ ID NO: 36090 - DNA, 2790 bp, Mus musculus
cctttcctatttccaacttcagtgcactgcattggctatcaagttatacagagacagaagtaaaatggatgttgtacacccacacatgtgtctgtgtacacgctcatacatttatctaaaccagtgtccacataacaactccttaaaacatttggtaaaaagcaaaggattccatatatacatacactgtttagatgaccaggtatcttaatctatagtgatacttcagaattgctgtttactataaggctttttcttattcgtaatttaatgaattctgttcagcctaatgtaaaaaaagacttaagtgatatattcaagttttactgagataaaataggaaattattttacatattagaaataattattaaaacgagatacacatttcacttaaaaagttgttcttgggctggtgagatggctcagctggtaagagcacccaactgttcttccaaaggtcctgagttcaaatcccagcaactacatggtggctcacaaccattcataaggaaatctgatgccctcttctggagtgtatgaagacagctacagtgaacttacatataataaataaataaatcggtttttttattttaaattgttcttttaagctaggcatggtactatgcaccaggagccacatcaggaaattgaagtcaggaatttgaggctatcctggacaatataggaagaccctgtctcttaaagctgaaaaagaaagaaagttcttctcttgattcagtatgaattaaatttgttcaaaacacatgtctatcgtgacttgccacataatcatttgtaatgtggtttgatttctcaggaaaggtcctaaactgcctataacgttatggttttaatgttaatgataatttagtatgggagagattattattttttgatttgtaaattagtattagttaatgaatatcttcaattatattacaatagtttgataaactgaggccagtatttcatttagtctttgatagcaaagtaagttatgtgggatcttgcttttaaagttgaaggtatgtcctggactggaaaccagctttggtttggtttgttggtatttcttactttcaagacataggtatgagtgctgttctcaaggggagatggagtacatcctttgaataagtcaggtccgttctaggagatgtggttaaatgtatataaacgtcttgcttctgtgttaattcctatgtttacactgatgctgatggagatgatgaaactcagttacacagacaagcagtgtgtactaatcattaggaagaattgttcttgacatgtatacagcagtgttcaaagcaagttattttgtgatatggagaacattttactccagggaagtaggaatattttcagggtagggataatttccccactaggattttgaaacttttttttttcatatgattgcagatggtcccaaggccactgtagtcattaacctgttatcagctaacaaaacttaaattacctgaaaaagacacttggtgcagaggccataactaagtcttaaagacatctttttaaaaactacatcatccttaggtagttctatagagggaaataatagacagattaagatgaaagaaaagctttctgggatgattcagttataggaaatgccaagaaaagggcatttaattataatatcctaattttacatcacaacattacagaattacacaaaaggataatgtgtgtattttttttaaattagtgttgcaggaatgttcttttaaatgtactaggggatgaataatttgagctctgaaaatagaggaagatgatggggttcatttctcacctctctttattttaaatattaaaaaatatattttcttcctaaaggaattccagtttacaaaagttaacttgaaaccaaggtaatttaggattataaaaacggggccagatgccttcctgatcgctcttaacataggactgtcttggtatgcagatgggcttctttgtgatcagggagagcttcgcatctggacatgaacaagctcaagatatgcattcccttttcctctgcagggatttgcgtcttttatataccttaagagaaacattttgtctttcccctctatgttgacagatctcagtttgagtggatggttgttttttaaaacttgttttgctctaagtgctaggtatttaaaaactgtgtgattccttggttctagagccttttccctgctgccatcttgttgctatccttcctacttgctgaatatgtcaccaagtagcaacctttgctagaatatattcctaatttcctcatcttgtaacttattacagggtattctgttgtgaattagcagtttagagtgtttaaatatgtttgtaattatagtttgtttttaattatagaaaaattccttcttttcccctctatgagtgtattgatttggaatgtaaattgtatgataaatcataacattgagtgaaacactctggataaagctgattaagacaaaacatctcagccaagcatttaccttagcacagttctcttgtttatagcaacctatgcagataatcactactgaataaacataatgtctttgtgcctagaaatgagtgtctggtggaaatcacttttctgcaatgttcatggaagctgatttttgtaccttatacacttgaaataaatacaggtaattactagcactctgggaagatggccttgcggctttatacaaaaggtgaaaacttgacattttttcaaaagcaaagtaaacatttgcagagttcattatgtagataaaat

SEQ ID NO: 36091 - DNA, 1171 bp, Mus musculus
atgatatggtgagggcagtggcaactgggaattccaggcatcgggatgaggatttgtgaaggaaatgtcacaaatagaaagcatgtttaaataataagttttaggttccaattgattagctaggttctaaatggttattgaattttgaatgtaatcctttatttgaaaactttcagaaatactataatctaatattgaaaatatatatatacatatacatacagatagtcatatatatatatatttctgtttttatttttaacaatttcatacatgcatataatgtatttttattttatttacctcccccacccgacttctcttctcatccccttcccactcctgctgacccatttttttcttcaaagttcaattttataaaggatctgtaataaagtttatctatatatcaaatgtaacaaaatttatactagttacataaaagagtatttattcggattcatccatagttactatttttatatatttgtagtattttaataatgaaaaatatgaagcacaaagatatgatggattcctgaagacatatgagactgcttcattgaaaagtacctctactctggcaatgctgaattttggccaaaatgctattttcagtgtcggattaacagctataatggtgcttgccagtcagggaattgtggcaggtaatgggtctatgggtatcacatttagagaatattataaatgggttaatggaaggaataaatgttttgtgttaattgtaaagtgtgttcaacacaatatttagccattttagagtgtttttcttttcctatcagaatgtattttattgataattcttttatttccttttggttaacactgacttactcattgaaagtaagaattctagttacacattttatggctctgtaacctgatgctttaggagaaacatttttttaaaaattaaccatgtaattttatgatacttttaaaaatgtttttattaatttgagatagcaatctttttagtatctaatgtttttaatttttcttatagacctggaaagtaatggcattaatttactgtttagttcaaaggacttgttttataataattaccagcatctttcttgtagttttttcatttacaattaatatctggtgtgacattaatatcattatttttggtcatgagagccat

SEQ ID NO: 36092 - DNA, 1841 bp, Mus musculus
ccgccacagccgccgaccgggagaggcgcgcgccatggcctctggagccgattcaaaaggtgatgatttatcaacagccattctcaaacagaagaaccgacccaatcggttaattgttgatgaagccatcaatgaagataacagcgtggtgtccttgtcccagcccaagatggatgaactgcagttgttccgaggtgacacggtgttgctaaaaggaaagaaaagacgggaagctgtatgcattgttctttctgatgacacgtgttctgatgagaagattcgaatgaatagagttgttcggaataacctccgagttcgcctaggagatgtcatcagcatccagccatgccctgatgtaaagtatggcaaacgtatccacgttctacccatcgatgacacagtggaaggcatcactggcaatctctttgaggtataccttaagccgtacttcctggaagcttatcggcccatccgtaaaggagatatttttcttgtccggggtgggatgcgtgctgtggagttcaaagttgtagagacagatcccagcccttactgtattgttgctccagacacagtgatccactgtgagggggagccaatcaaacgagaggatgaggaggaatccttgaatgaagtaggctatgatgacatcggtggttgcaggaagcagctagctcagataaaggagatggtggagctgccactgagacatcctgcgctcttcaaggcgattggtgtaaagcctcctcggggaatcttgttgtatgggcctcctgggacagggaagaccctgattgctcgagctgtggcaaatgaaactggagccttcttctttctgatcaatggtcctgaaatcatgagcaaattggctggtgagtctgagagcaaccttcgtaaagcctttgaggaagctgaaaagaatgctcctgctatcatcttcatcgatgagcttgatgccattgcacccaaaagagagaaaactcatggggaagtggagcgtcgcatcgtgtctcagttgttgaccctcatggatggcctaaagcagagagcacatgtgatagttatggcagcaaccaatagacccaacagcattgacccagccctacggcgatttggtcgctttgacagagaggtagatattggaatacctgatgctacaggacgtttggagattcttcagatccataccaagaacatgaaactggcagatgatgtggacttggaacaggtagccaatgagactcatggtcatgttggtgctgatttggcagccctatgttcagaggctgctctgcaggccatccggaaaaaaatggacctcattgacctagaagatgagaccattgatgctgaggtcatgaattccctggcagttactatggatgacttccggtgggctttgagtcaaagcaacccatcagcacttcgggaaactgtggtagaggtgccacaagtaacctgggaagatattggaggcctggaggatgtcaaacgtgagcttcaggagttggttcagtaccccgtggaacatccagacaaattcctcaaatttggcatgactccctccaaaggtgttcttttctatggacctcctggctgtgggaaaaccttactggctaaagccattgctaatgaatgccaggccaacttcatctccatcaagggtcctgagctgcttaccatgtggtttggggaatctgaggccaatgtccgggaaatttttgacaaggcacgtgtactcttctttgatgagttagattcaattgccaaggctcgtggtggtaatattggagatggtggtggagctgctgaccgagtcatcaatcagatcttgacagaaa

SEQ ID NO: 36093 - DNA, 3086 bp, Mus musculus
ttaccaaaattttgcagtaataacaattatttttattttttttttgaaggtgccaaatcaatcattcaagaatttccagagatcacaattttaactacagaagtccatcctgttgcacctacacattttggacagaaatactttggaacagactaagttcttaaaggaaaatgaaataccttacataatattatggttataaatggattccatatctgtttttactaatttgtttgagaaaatatgttaggaataccttttaacattggaagtaggtgtagcaacaagaaatattggaagtttatttatttgatttgatcatttcttcacatgtggtaccaaattcaacaatgaagcacaacctcagtgcttaaaaccgatggaaattttaattgtatgctaatagaagtcactgactcttcagttagtccatggagactgtagaacttaggaccccatctcttggtttggaagttgcttgtagctgccaagaaaacccaaatgagagttagttctttggtacactgcaggtttacactgtccttactgtgttttagctctagagtgtttccctgtatgtgggtcttgtcaccctctgtactctatatactatatatatatacacatatacatatatatatatgtacatatatatatgtacacacacacacacacacacacacacacacacacacacacacacacacacacacacacacacatgcaggtaccttgaagaagagagaatgagagtatatcccggaattttatgttgccatttatgtcctcacttaatttgcaggcccaagatgtccgcttaacttgtctgctaagccgttgtattcctcaaggctggctcatttccccaagtgggaattgagggaaggtacttaccaagctgtaacatggtgacaaagacgcagggtcttttcagtaactgaatctgtaacatgagtctacagagactaaaccaccgatgcctgatgctgacccaagagagctcaatcagccttctacaaaggaattggtgtagatttttctaagatgtgggggaaagtagaggctttgcttttcgtggccaataaggaaatcaaaacggttctttggttgttgttgtttttcaaggtagggtttctctgtgttcctcgggctgtcctggaactcactgtgtagaccaggttggccttgaactcatagagatccacctgcttctgcctcccaagttctgggattaaaggcatgcagcacaacacaatatgcaatacggttctttttaatttagttgtttctattacttgcttttggtttggaacttagttattttgcatgtcttatgactatacctgtattaaagtagagaatacataaagtcttttaaaatatataaggtttgtatgtgttcatatttaagcttctgaaaggagaggaaacaattttagaatcaatctttgcacttttgaaatgtgcttataaaacccagattcctgttttacatggatattgtggtggctgggtgattacttgattaattacactctcatggccctgcagagagctgctgtggggctctgttgaaaagtataagaaaaagtacataggaatttcttagaactgaagctgaaaaggtcagtgaagctcaagggaggaaagcaacctggaggaaattgactggactttaccttatggttctagcctactaaacttcactgtactgttgttgttgttgttgtttctttgaggcagagcttctctgtgtagtcctggctatcctgaaacatgctctgaagaccaggctggcctccaactcagagatccaccaacctctgccttccaagtgctaagattaaatgtgtgtgccaccatgcccagctactttgtttttggttgtgagcctagccttcaatggctgagccatctctccagccctatttttgaagactattatgtaataaaattaaaattcatcaaacagttccttccatagtagaatgttgccttcaagttcttcctgaaatttttttgagatagggtctcctggctggcttgtaacacatagacatcatcctgcctcttgagtgctgggattaaagttgtgctgaaagttatatttatatttgatattaggtgtcctaagaatgatgtgagtgcaaattcagatataacggatctgttgacattgttattgcactgaatcagtagaaaagacaatggatgctcactaacatgggtgtggtaggaggatttcaactttgaggctagtgtaagtaactgagtcagatcttgtctcaaaaattttgttttgcccactaacctaagaattgctgtgactcaattgaattggtgcttgtcttggctgcagtattatctttgaatatgagataatttcaaactccactgtagggataaaaccatattttaagcaaactcttttttaaattttgaatcatgtcttcgtacataggctagctttgaacttgctgtgtagtcaactctgatcttgaactcctgttctcactgcctccactgacttctggtatgaaaggcttaccaccagcatgccaatttaaaacaaattatttttctaccattagccatttagattcaaatgtctgttgcttttcagcaataaatgtgattaaaagttaactacatttgattctcacatggaagcttagtataaacagtaggaattattcaataaggtcatattcccttctgatgtttgtaccctacaactcctgcagatataactctggtctctgaattttggaatgctttagcaaacaaattcgtacttgcagggctaatcacttgcaggactctattttctaaagtcaacataagattaacagactattaaaagtaagattgactttagtgacatgaacttcagagcagtataaattgtgcaggttctttattgaaaaatagaagctagagcaaaatgatgtgcaaataacacaaagctgtgattctcaaagtatggcatacatcataattattcccaatgatgtgctacagattgctgaaccccaaatttacagtgtctgatttaatgtcttgatttccaacattgattcttttta

SEQ ID NO: 36094 - DNA, 1221 bp, Mus musculus
aattcaaattatatatactcatgtttgggtcttatatcttgttcttttggcctatatatatgtctggttttgagcccgtaacattgtttttattaatgtatctctgtactacatcttttggcccagaatggtaatctctgcagcacttttctttttgctgacatttgttttggctaccagtagttccatgtgaattttaggctagttttcccaatttatgtgaagaatatgatgggaggtcttgattgagattgcattgaatctgtaaatggcttttggtagaatggttcatttcaaactggtatttctaccaatccatgagcataaggtatccttccattttagtctttctctacctcatcagaaatttaacatattcattatagaggttatccactacattggttaggtttatttctacggattttaattttctttgaggctattggaaatgggagtgtgtcagtaacatcattcttttttaaaagatgtatttattttatgtatatgagtacactatagctgtacagatgattgtgagccttcatgtggttgttgggaattgaatttttaggacctctgcttgctccagttggcctgcttactctgagcaactcgactcgctcagttcctgcttgctccagcccaaagatttatttattattatacataagtacactgtagctgacttcagacacaccagaagagggcattagatctcattacgggtagttgtgagccaccagatgattgctgggatttgaactcaggacctttagaagagcagtcagtattcttacccgctgagccatctcaccagccccctataacatcattctttgtgtgtttgtcagtggtgtatataggaaagctaatgacttttgtaagttgattatgtatccttccatattgctgaatttgttatttctagaaattttctggtaagactttgagaccctctaatgtatgatatcatgtcttctgcaaatagggacaattagacttacattcctttaatttccttctcctgccttcttgctccagctagtgcttcaagcacagtattgaaaaggagtggggatatccctgtctcattcctcacttcagtgggattgcttcaaaatgagaattatggtggctgcggggttctcatatatatagcttttattatctgttgtatgttcccttttatcctgctctctctaggatttttatcataaa

SEQ ID NO: 36095 - DNA, 5185 bp, Mus musculus
ctgtacacagccccctttggttcagtgatgcccttgtgcaagtggaggactcaaacggacatctttctagctagcaagagaagctactctggccataatagcttaaacacccttagtggagtctcttaattcattattgcttgataccctgtttcttggctttaactgttgttgaaataaggcattttgtaaataaattccttttggtttattttactaatgactgatcttagaaagtatttacatttatttgatacttcacaatgtcaggtatataatctcatcacagtatctcatataaaactctctattaattcttctccctgttctcagtagtgaaattctcttaacctgttagcttgtacctggtatcaggattaaaagtctatataagaatagactcttagccagacttaagtgactcatacttgtaattccaatacctgagaggctgaggtaagagagttccatgactttgaggttagtgtgacctacagagtgagaccctgtctcaaaaatgaattgtttaaaaaaaaatggctttttcctttgtggtgactatagctctctgatttcctttactgttttggaaggatatgtatacctggaacagcagcctgaacggtcaggttagagagtgcagcccattcattagagaagagcaagggcctttacttccttttagagcattgttgtcatttgtttattggttggttggttggttggtttttctgagatggagtctcaccttatagaccattctggcccagtaccagtactcactatgtaggtcagactagcttcatactcacaatcctgccttgttcatcctctcatagctacgttgttaacctgaaacttagccagtagcaataaatgctaatatagtacttataatgtgatatatgactgagaaagtggtttcccatatataatgttatagacaagagcatatatttatatttgacatataaacatttgttgatttgaaatgggagggaggtgtttccttctcaggtgaagctgttcagagtgaagaaagacttcagttatctactcaggttcgtgtgcatctacaacagagtttgatcactgaaagttaaaggaaaccacaacccttgcggtgcatacagacaatactctctcaagcggaactataacattcttgtgtaagaaaggatttattgccaggtggggacctgggaggcagaggcaggtgaatatctgagtttgaggctaccctggtctacatatagagtgagtaagggcttcacagcaaagccctgcctcataaatatacagttctatttgaggataaatgtattgaatactaggaaaataacactttcaatgcttttattggaaaattcttaagagtatttcaaacatttattaaaactttccttttataaaaatgtatagctttgaaagagttggagagtcccttgtatttcatactagccaggctgttaaaaaaaaatctatactgtgtaattttctttagttgcatgtcaatatatattatcttagaagttgaggaagaaaaagtattgaccacatataattgcagttccatcacagagcctgaagcagcctgcacaggtctgcaccaggtcctgtgtggatttattatgatttccaggttaggattttatgggatttcttagtatgagactaagtgggtctcgatttcttccacttttttttgagctctttttcttctctttgttttgtccaattccaatgtgttagtttttattttatcctttttatttttattagtattccttaaaagcctgttttctaatgagagacagaaaaggggtgaatccacatgggaggggaggtgggatgagggaaggggaaccataatcaggatgtattatgtgaaaaagaatctattttcaataaaaggaaaaaaatagctctttccaggttgttcactgactggacaactagcttaatgactgtttagatttacagaggataagaaacatgacaatcggagtgtcttgaagtaaataataggaaatgaaaaggaataactacagagtatgcaggtggactctacgaggcaggagccagcttagaggggaacagtgagcagagtggttctctgatgctttaaatgagtcataagatgatttcaggattctcccctagccatggacggtcctgtgtaactccctgctgtttagtgtggccaaagcctgtgaatatgaagaaactttattcctaagttggggatgatttggtttttaattagtcaaaggaaacaccatcttagataggtccttcccaatagatgagtccttaaaagggtcaagccagagctccaggcatcctgttgtggaaacaaacagccatgctttgagaggaaagggtcatatggaagactgaaggggacatttttcctctggctgatggccctcaagaaaatggtatcaaaattaagttctaaggaacttacttctgtttactagtgagctgaaggtatggtttgggccctgggaaccccagaacagaggatctagttaagctatccctgtactctttttttttttgtttgtttgtttagttgggttttgggtttttttcttttttttggttgtttggtttctctatatagccttggctgtcctggaactcactttgtagaccaggctggcctcaaaactcagtaatccacctgcctctgcctcccaagtgctgggactaaaggcgtgcgtcatcgcccggctacatgttttatcattcatgtagtttagaatttctaaagcatggtggtaatttaagcagactagggttttattagttttgatgatggctctggcacttggcttcataggaacatgcccagagcctgagttctctggggttggacaagcctggaacttgactttatggtggcaagtctgaaggactcctgtctggagcctggatctctacaggtcagagactactggggtggtgtggacccttagatattttggaatttggggccagcctaactagggtagagcctgaagcatagatccctaagagacattttggagtctggtctgtgaatgccagcctaacacgttacctatagaggctggatcttttggactggcctgagcattctggtcactgcagctagcctgtgttcaacgtgtgactggaggccatgttcttcagggcagacctagaatctgagttcatgtagacaaactagataccaaggactggcctcgtcagtggctttgctgaaatgagtctggaccccgagtcctctccagtatggagctctgaggactactgtggatcctgggaaagtaagagctggtatatgtggcaaccagcctggaaactgggtctccatcataatggcctgtgctagtttagagtgtggggctgcaaaggctatcctgatgttgagttgaacctgtactgggaataggatgcaaatctgacactgaggttggcctacagtctaagactatggaatctggtttgtcagtggtctaggcctggtctgggatccaagatgggcctgaaacatgagtgtgcaggatttagctagagcttctttcatggggctctaaggcctgcctggctttgcgtctcatcgctcctatgctgtttgagtagcccatgcgaagtcaagctgtgcttcctttttttttttttttttaatttatttttttatactccatatttcattctccaccgccccacatctaccctctgctccacatcccacacctcctccccactccaccccatctccatacggatgtcccctcctaccaccccacctgacctctaaactccctggggtctccagtctcttgagggttaggtgtctattctctgactgagaccaaatgaggcaggcctctgctgtatatgtgttgggggcctcatatcagctggtgtatgctgtctgtttggtggtccagtatctgagagatctcaggggtccagattaattgagactggtgatcctcctacaggatcgcccttctcctcagcttctataatatatctttttttttaagagattgggtattttttatttttattatttaatgcatatgaatacactgtcattgacacatcagagagggcattgtatcccattacagatgcctttgagccactatgtggttgctgggaattgaactcaggacctctggaagagctaccagtgctcttgacaactgagccatctttccagccctaatacatctttttttatttccgtacctgagccaggtgctgcatgctgccacctgaattactgagcacttgcaaaaaatactttgatatgtgaatagtagttgaatgtgatgtttctgggacggtaggaacattgaaaagtcctattcagccatcttgctgtggtaactcatataaacttttaataggtttccttgaggttagattttctattttgctttatagatcaagtatatgaagcaacatgaactacataaatatatatatatatatacatatatatatatatgggggaatgtaattctcttctattatagaagtaatgtttagattgtgggtattttattcagcaaaaaagttgttgctagagactaaaggaaaagtctagaaatgtatcttctgggtttgattctcaaccagtcaccttgtaatccatctctaaaaggctttgaatttgtgctgatccttctgcctcaggtttccaggtgctaggattgcaagtttttctatgtatagccctggctgtcctgtactaactctgtagagcacctgcttctccctcccgagagctaggataaaaagtgtccaccaccatgccgagcctgattgtgatatttttacataatggaaataattttactaactttcagtaactagaaaagaggcacacatttattgagtcactactatacacagaatctttgtactttgctatttcattcagagttaggataatcctaaaagggatgtcttaccttatttttatttcctctttgtagtgagaatataaattatttagtcagtatggaaagagtagtgtggaggacctcaaaatgtggaagtagaaacatgcgatcctggtatactgctatcgggtgtatacccacaggagtctcagccagcagcctgtaggtgagacacttgcacatccatctttattgcagcattatttacagtagcc

SEQ ID NO: 36096 - DNA, 1159 bp, Mus musculus
acgggtgcgccaaaccaccagttgtgtgctgggttttgctatatagactgtgttttatcaggacactgtgtggaaataaggtatgatcttaggcttggtgaggaaaaccagaggggaggggttggcagaagaaaactgctgtcctctgtaggaaaaggcagcagtatattatcatgatagtgatgaagataatttatgcgctctgtgtgtgtgtgtgtgtccagctatttaaaaaatttttttaaaaatatcaggcatgattgttattgtctgcagtcctagaacttgctcagatttttttccataactacttaaaatgtggaatcaagccaaaaggaggctacccagctgtatggcctgcatctagttaggagcaagtttcaataactggagctgaaaaggagtaattggtattcacatgagatatctccctctctatttggctttcctaatttttcaagattgcagtatattgttattaacaatgctcatcatgttgtataatagatcccttaaacttatccttttatgtatttgcaattgtgtgtcatcattgtccatcctttctccaggcccccttactgcctgacccctgctaaccacccttccactttctacttctgtgggttcagctgatgtgatgtaaaagtctggaggcctgctacctcatataaggcctcatagcagactgttcaaatggccagtataaattgctagctaaagtcagagtttcctcagtcggctaggttggaatgtgctgtgtagcatggtcatgtggaaagtccaaaggaggctgaattcagcccatctggtttcttttcacaagggtcttctatactagtattgatttgtgcctgctctggatttaataaaaactcatgagaagtgaactcagagtcaaatgtggcctgttagttctgataaacaatactctgtttggttcaaatcacagttactgcagaccatgtactatcccactcttaggccaaacaaaccattcacagccaaggctctgcttaacttgtgagcctagagatgagaggaaaggtgacagaaggctctgagagacaaagaggagctagctcacttagatgacacctgttaaaccagtaggcaaattccactgcttttttttttttttttttttttttagttagag

SEQ ID NO: 36097 - DNA, 1217 bp, Mus musculus
actcagactttgggactttgaaaaaggccagtggtttacctatccaggaagttagaccctgttgccagcaggtggttttcttgcctgaaagctattgctgctatataacactgtttttcaaggatgctgataagctcactctgggacagcaaatagctgtagtggcaccccacactcttgaaagcattatccaaaagccccctgactggatgactaccaacgctcctgtgacacatcagaactttttgttgactgaacgagtgaccttcgcttcattccacttgctgtcccactgcgtgagactgcacctactcatcactgtgctgagaaactggtacttaaaatgatctgaaggatcagatcagccttggcctgagagttcaaactggtacactgatggcagtagcctctcggttaaaggtaagcagaaggcggggacagcagtacggtggtgaacagaaagcaagtgatctaggccagcagactccctgaagggatgtcggcccagaaagctgaacttgtgactttgagacaagctctatgaatggcaaaagaaaagtctacactgacagcaggtatgcttttgccactgtacggggcaatatacaaagagggctgttgacatctgcagagaaagacctaagatgctgtggctaaagaaaatcagatggcagatctaacagccaaacaggtggcccaggtagcaatgatcctaggcagtcaaggaacctaaagattattatgacatcagggagaccagctttagattactgctgagcactatcaagttatggacagtatttgacccacctgggggccaagaaattaaaaggtgtggttaggtcctttgactactatgttacaggactctctgacttggcagaagaaatagtcaaaagctgcaaggcctgtggtatgacaaggtagaatttctaaaagaaatcttcccaaggaaattgggtccaataacggacctgtcttttgttgcccaggtaaaccaggaactggccaagatattggagattaattagaagttacattgtgcatgcaggccccaaagctcaggacaggtagagaaaataaatagaaccattaagagacccttaccaaattgacagcggagactggcgctaatgattggatagctctcctaccctttatgctcttcagggataaaaacacccctggacagtttagactgacccccctataaatta

SEQ ID NO: 36098 - DNA, 1242 bp, Mus musculus
atgctcagttggtctctgaccttcccttggcagtggaaaagatgttaacaattagaaaaaaaatagcctggagtatacatacagaaatttagatgttggttccttcatgggactgagagatgagtgtttctcttgacctgaggtacattttcaccccaggcatgggatttcctataggtagtctaactccgagaggcgcttacaatgttagcgtgacacaagtcatagttctttgagaggagggaacttcaactgataaaatgcctccataagatcgggctgttggagtctggctagcagtgagcttgaaggctctggctttaacgttgggcacatggtaactaatgctattatttctacagtctccaaagaaagttggcgatgacattgccaaggctaccagtgactggaaaggtctcagaattacagtgaaactgaccatccagaacagacaggcccagatcgaggtggtgccctctgcctctgccctaatcatcaaagccaccaaagagctaccaagagacaggaagaagcagaagaacattaaacacagtgggaacattacttttgatgagattgtcaacattgcccggcagatgagacaccggtcttttgctagagaactttctggaactaccaaggagatcctgggtactgcacagtctgtgggctgcaatgtggatggccgacaccctcatgacatcatagatgacatcaacagtggtgcagtggagtgcccagctagttaagaagcaacaagaaaatatttcaataaaagactatctgataaccagaaaaaaaaatcaggctgttgggccagcctgtagaaagagcatttttaaattactgatccactggggagggccaagcacattgtgggtggtgccatctctggcctggtggtcctgggttctataagaaagcatgctgggcaaccatggagaacaagctcgtaaggagcacccctccatggcctctgcatcagctcctgcctccaggttccttccctgtttgagttcttatcctgactttctttgatgataaacagtgatatggaagtgtaagccaaataaacccatttcccctccaagttactttggtcatggtatttcatcacagcaatagtaaccctaactaaaacagtcactctgtctcaggaaactttttgagacatgttctctttatgtaggccagctcttgtattttggtaaattacagctattatacaaggtgtctcattct

SEQ ID NO: 36099 - DNA, 3051 bp, Mus musculus
ccaccacccttacagcgtgcaccgccccccacagtgagaagcaaaaatccaggaccttccccagggaaatcaatgtgattttgcactaaaagtttaaaggattattaaaatcatagaaagatcttttatttttttaggaatcaatgacttaacagaactcaactgtataaatagtttggaccccttaaatgccaatcttccatattagttgaaattttttttaactatagggcataccatttctctctgacatttgtcagtgaagttgcctacaatcttcttacacacattgagtacagaagatatttcaaattgttttcagtgaaaacaaatccttccataacagtaacagttccacagatttcctctctaaatttttatgcctgcttttagcaaccatgaaattgtcataaaattaatggatttagaaattaataaagatttatatatccgctcttataaaaacacagctgagttcttagagttgattcctcaagttataaaatacttttgtactaattccatttcttgattagagtgattgaaatggtcttaatattcttttgactgaagtttgaaactgggctcctactaaatattgtctctgtgattaaaagttagatctcaggcttctcttagacacagaagcgtgtgcaatattcttaaatactactactctaaagttgggggagccttgcatttatcttagccttaagtacagtctaagacaagaaaattccttttcttatttagtctttctgccatttttaattttcagttgtatgtgctgaaataactactggtaagatttcagggttgtgaattatcctctgcatatgagtttcctgtctcctggcactaatggaagtccaatctgtcagccatggtgccagtgctggtgcttcatcctgttgctggcagtgggatgcaaactaagaaaatcaagttagagctcttgaaattgtggtttttaggctcacaccctgtttttataaacaacatcaaaatggcagaacctttgctgactttaagttcatatgaggaatgtgcttaaatcctctccagtactgtcagtattgtggaagaattcctcttacagataaggatcactggcatctctgctcttctttgcactcgtcaccctcttccctcttccaagttcctttacagtttagtcaattgttttcaagtttgatccgagttgggttccctttcttttgattgttcttcctcctctcctctccctcctcttcttcctcttagataaagttatttcacttaatactcttaagagaatttttttttcttttctagaaaaatcagtgtatttctttttctagatccaggtttgtttaaaacaacctataatttcacttatgttcaatctgattgttttaagtttcttcaataagaagattgtgtttgactatgggagtcaactcattatggcaatatcatttttgaaatcatgatgtaaaacaagtagtagaaacagctaaagaaaagctgggtggagtgtttgttctaggcatcactggacttgattgagattgaattgaacatgagcttaaaacttgttatttgttgtttggataataaaagatttccatttttatcttgtaagaactagtggttaaagtacccacacacgctgggtttttgatcaagaataagtgaagtgtggtggctctactttcccatgataaaacacactcatgagctctatgtattttgatattgtgccagccatataagcaagcttatttaatgaggggggtgggccagatgtgcgtttactttggaagaaatgaaagaagcaagacttgtgagataaatatttgaaagcagtatgctctggccaactgttatcagaatacttttaaactgatttactagacatgggaatttttatatggtctaattatttactcaaaggcatagatgtgaaaattttaggcaacattatagtccattttcacaatggatgaagctataacttgaaaaatagtaattagaaggattaattggaaattggagagtttgagatagaccttggaccacttgcatacactcttctcacttgatattttagcaacataatatatgtactttgagtataacatcaagttttaacaaataaagacaaaaaaaatcacataagatactaaaagtctcattttatatttgttttagatgttttaaatagttgcaatggcttaaatgacgatttaaaatgttgcttgtaatacagttttgcctgctaaattctccacattttgtaagctgttttctttctttgggtgtaaagcgtttggcctagaattgtgatattgtatctgttttgtcccggttgtatagtaatgtttcagtccatcatccagctttggctgctaaaatcatacagctgtgaagacttgcctttatttctgttagactgctttttggttctgtattgagtatcttaagtactgtagaaaagatgtcacttctttaaggctgttttgtaatatatatataaggactggaattgtgtttttaaagaaaagcattcaagtatgacaatatactatctgtgttttcaccattcaaagtgctgtttagtagttgaaactttattaaatgacataagtgaccaaaatgtgttgtgctctttattgcattttcccagctttgaaaaatctgtgcacatattgtttcataggaaattatagattttgatgtcctgtctaatggtggttcttttgcacatttggttgtttactgtttgggaggtcaagaagtttggttttgaatctgttatacactaaattctgtaaaaggagatctctaacctcaaaaagaatttacataccaggaagacttgtgtgtgttgttttggttgtctctgtgtaaatccagcatcattccctgcttctccacagctctgccattcatcttaagtcaggcagggccactttccacccttgttttgagtaattactgcccagaagccctaggcatggagaccatagtacctgatccctaaagaagtcaaaaacagttttttagact

SEQ ID NO: 36100 - DNA, 1193 bp, Mus musculus
tggcatctactactaagtttataattgaaatatgaagtttaataccagttgttacttctctgcctcttttattataagtttagtcattttttttaataaaacaaagtctagtattattgatgcatacaggttttctgatagaaaaattcttattacttatctgaataagaatagagtaccaggctgggcagtggtagtgcatgcacgtgagttccaggacagccagagaaatccagtgttgggaaaataatagaataccagaaaataccacaaatttaagggaaattattttagttctaccgtagtttgtaggtaattaaacgctcgtatctggtgtttgctgggataattgatgccaggtataaggaacagctggattgcatcttgtctttattttagatcttctgctaaatacccttttggaggtaaatcttgggttttttttctcctttatttcttaaaaatgtatttgctagtaggggggagacagcccagtttatgagtaggcatctggacaacttgcaggagttggactggactgcaggtacctttgctgactgaactatcttactagcccctctgtttcttttgagacagccttgtccctctttagttgagactgctgtggaagtctcacaaattccagccttccccctgtcttagtctctatagtgctgagatggcagagctgtattaccacaccgggctcctagggaatacttttaagcaagctttgtgatcctcacaattctcaagaaataacagtgtccacaccccatgaagtaactgcaccaatgttcactgctagtttcctttagatagttgttagaataataccacttggtaaattcatttctctgaaaacaatataattttagaaggaagcatcatatgatgtctttataagatcaaagcttgacatatgaatgaaaacattcaggggacaaaggaaacaatctgagctacactgtgggagaaacagaatttgaggcttgagtttcctttgagatgaattgtaccagttgtcagaatactaacagtaattactaaagactaatactcgcttcagtgaatctgtatggacttgtcagagaatgaatattcttcccaataactaaggattttgtctccccgtttcttaaacactatatgagaagagctatcttttaaccatctaatgtttctgtagtatt

SEQ ID NO: 36101 - DNA, 1203 bp, Mus musculus
attgtggccttaaagttctgatctttctgtgtctgcctcccaggtggagccataattgtgtgcatgcaacctgtaccaatttggttttatttcataccaaggatccagggctccatgcattctgccagctaaactacatctccaacttgtagtttgactattcagaatgtctagttatggagtcctggcctggcctggaccatgtaattgccctcctgatgctgggattataggcatgtactattccacttggcctatcacccacctaattttttttaattaaatttagttattgtgtgtgtaggtgcttgggcatgtgagtggaggtcagaggacaacttgggggacagctttcttcttctacctcatgggtcctggggaagaaaatcaggttgtcaagctttttggcgggaacctttaccccttcagtcatcttgcttttaagtggtactcaagaatgaaaaaatctacaattatgaaagagcaacacatgaaattcctctgagttttcttactctactttcaggtgaaggaaagtggatccgaaatattgactattaccgcttggatggttctactaatgcacagtcaaggaagaagtgggctgaagaatttaatgatgaaaccaatgtgaggtatgaaacattttctgtatgtatagatatttttcaatttaggttcagtaaaattagctttttaatgtatttttaataatatttaatgaatgatgcaatcaaggccaaaaccaggtgaatttacaaccttcaccctaaaatctttactcacggacattgtagtcatgtcagtctcacatctatcacttactaaatgtatttgagcagacatggtagcatatgctttaattccatccagcatttgggaggcagaagcaagtggatctttttaaggtcagtgccagcctggtctacatagtaagttgcactccagcctgggcagcactgtaagattctgtctcgaaaatatttgtgattcatgcttcttttcatttttgagttctagggcatcatagccattaacttctcaaggtcatttgaactgttcccagttttggaattaaaattaaagctattctgaatgttcttgttcaagcttttgtcatcactagtattttccttatggtgaaaatgtctgaggatcttaaatgctggtttgtgtgatactcctgatgtttatctacctgtg

SEQ ID NO: 36102 - DNA, 1167 bp, Mus musculus
aatcatttctggaatcctagcatttgagacgtggaggcagggagatcatatgagtatctcaagcacaaagggggtgttgtatagcaaggtagatcagtgagtggaagctgttactgtgtgtgcctattgatttgagttcagtgtctggaacccatgctacaaggtgacagtcgattccagaatcagtttgagatgccatgatttattttattttgaaatttcatcttatctttttaaagagagagagtgtgggaggatgggggtagagaatgagcagaaatgaatgtgtgtgtgtgtgtgtgtgtgtgtgtgtgtgtgtgtgtgtgtgtgtgtgtgtgtagaggaagaaaactttggcagttttcttccaccattgggttgctgactggtgtagagctcaggaatttgcaacagggtctgagcactctgacatgttgaatcatctctctggcccccttttattttataaaatagcatgtagattagtccgaatattgttggaaactggaggctagcataggattccaatatatctctgcctttatccattacttttgatgttcttcaacattgtctctgactcgtagtggttgtcttggccaacaatttattaactaattcatttaactcacaagcacattctacctttgctgcctcttcttgaatttttgttttcttaatcaccagagacattgcctctcttaaataagaaggcagatctaagaggaggcacccaaaacatttagaaacaagacttagtgttatatgacagagaatggaggtgaagagacaggtcaccataaaatcaaggaaggtttttgtgtggttttttttttttttttggtaacttaaaaaaaaattattaggtattttcctaatttacatttctaatgctatcccaaaagccccccataccttcccccccactcccacttcttggccctggcgttcccctgtactggggcatataaagtttgcaagaccgatgggactctctttccaacgatggccgactaggccatcttctgatacatatgcagctagagacacgagccctggggagtactggttagttcatattgttgttccacctatagggttgcagattcctttagctccttgggtactttttctagctcctccattggaaaaagtccaatgagaagc

SEQ ID NO: 36103 - DNA, 1147 bp, Mus musculus
actgggtttaacattatatttacgttacttgtattttctgtgtgttggaaattatgatctttagttggctggcttagtgtttaatgtaaaaataagtcatgattccttaattttatttttaaatttttttgtggatatttaaatgaacatgtaactttactttcttataggtggttagttttcttcacacagttcttctgtgtgacaaattggatttcagtacagctttagtggtttgtcctcttaacactgctttgaattggatgaatgaatttgagaagtggcaggagggattaaatgataatgaaaaacttgaggtaacatttaataatgtttcctattgaaacaatagcatgagattcatattcatactgaaagaattgtcttaattactaatgcacattttaatggtaatatttagaactttatttttaaaggtatctgagttagcaactgtgaaacgtcctcaggagagaagttatatgctacagagatggcaagaagatggtggtgttatgatcatagggtatgaaatgtacagaaatctcgctcaaggaagaaatgtgaaaagtcggaaacttaaagacatatttaataaagctttagttgacccaggtatgttactactagttctgactttacgaagctagttgaaattttatgtttatctttaagagtttctaattgagccaggcattctggctggcacacacctttaatccgagcactgtggaagcagaggtgggccaatatctgagtttgatgccatcctggtctactgaacaaggttcaggacagctagagctacacagagaaaccctgtgttaaacagacaaaaacattacaaataattggacatttattaagtacttgctaacagtctcctttgtccttgagattttattattcatactgataatttaaataatataaaactatccttaatgcttctagctgttccgagtttcagtgtttggggatctatggttgatgtattattagagaattgtaaactcctgaatggtatcaagcatttcagcagatttttttttgtcacaagatttcttggggacactttcaaacaatagtcttaaaaaccaggcgctggacaggcagacagctactcagctgcttaagcttgcccaca

SEQ ID NO: 36104 - DNA, 1106 bp, Mus musculus
aattcacacattatctctttgaatttcattcaggaattatatttgatttgattttatttaactttaaaacttgtggaaagtgtcttgtttgtttgtttgtttgtttgtttcttgatttttttttttttttttagtcccacagtccttaatggcttattttctttttaattgttttgatgatgaaatcaccattcaaatgtttgtttttggtatgcatacaagttgtgattgttgggccatacaaataattacatgttaaaggattttcctctacgttttctatattggttacatcaattagcattcttaaaagcagtgtaccacctcacatttacttttatacatttttttttacttgataacagcaggtataatgaatataaaatgatatcatattgcagtcttgaattttatttttcagtgacccgcagttattttcatgtttttgttatttatttgtgtaggtttcaaaaataaatacccttttgactcctttgccctgattgttttcctttgtcaaggtttattgagttttcggatatggctttgtttctagatataattaataacgcttttctccctcctcttggcccattccataagcagcaggaagttcatgcagcacgtttgtactctttgcttctgtgcttacatttcacagagccattctgaggaggacaagaaggaaggtgatgaggaggacgaggaggacgaggacgaagacgaggaagatgaaaatgatgattccaagtcacctggaaaaggcagaaagaaaattcggaagattcttaaagatgataaactaagaacagaaacacagaatgcccttaaagaagaggaagaaaggcgaaaacgtattgcagagagggaacgtgaaagggagaaattgagagaggtaaaccaacctttcagttgctatataacttccatagacatgtgtcatagatgcatacagattttcaagagttgaatgccttaataaactacagatttctaggtaaaattcttttacaccattgctagtatgctttgcttcttagtccatgtataattaggtacttggaaacacttgagactcttgtatgatcaccagaattattggagta

SEQ ID NO: 36105 - DNA, 1217 bp, Mus musculus
catatacttaagattaggaaattgctttcaaactaagaatcagttgagaagttatctagacagattcatattctaatctttatttcccaaataaaatggacgtaggtaatatgacattattaacttcacgaagacttaaacagttgattgaaatgtaaacaatgaagcctatatagttttaatctaagggatggctgagagaaggaaagaaagacacccctgtcatagcatgtcaacatggttttatatacattttaatcatttcccatcctttaggatagtagtcataatactcagtgagaagatagcatgatatgtatagtgaatggacagcttctagtcttttaataattgtatgatctcaggctggtgactttaacttcttttgccataattttaatctctaatattgaaaatttgatagtattttctcttatcctggtaccaaaatacgtgatagcctggagatgatcttagcaaagaacactaaaatggccatctgtcttaatagaaagctctagttttaagaaactaaaaattatatgtgtttgctgtcatcattttgtgagagatgaaccaagtgctctaagcacatctgttctctgaccttatttgatgttgtgctgataccaacaggtttctgttagtagacaggataggcgaactagggtgaaaggtcatatttattttgtacttaattagagctcatgtgtaaacccaaagacttttcttctgctttcctatttacttttttttttctcaacaaatgtctgtctaagctatttgatgggataatatagtaagtcctacattggaatgttcaaagcatacaatgtttagtcagggattttcgtataccatcattgctagataatggaagcatttacaacttatttgtcttttagaatgctttcgtttttcacttatataagctgctgtttcctatgaatcacaagtcttccaatgtcactaggtgttactcctactttttgaactatggaagatgatcttttatatttagccaacaactaagcatgttgtcaaggtacaattttggtatcacttatcaaaaattaagtaacagttttacttttaaaatgagtggattctatatatctctctgtaactgatatctattttattggataatttcgttaattcaattttgtatttgtgtggttttttaaatgcaaccctggtggttattttggagagga

SEQ ID NO: 36106 - DNA, 1574 bp, Mus musculus
gttgttggttgtcttttgccacaaacccttgtttagttttacatttcggataaaagtaagcagaccatgtaaattactactttaaagatgctcgtaggaaattttaaattcttttatcatcaaagacatgaaaattcctttcactagaaataacatttgaatccttaaaccatttcagatggtgtgcagaaggtgggaacttgatttgttgtgacttttgtcataacgccttctgtaagaaatgcatcctgcgcaaccttggtcgaaaggagttgtctacaataatggatgaaaacaatcagtggtattgctatatttgtcaaccagagcctctactggacttggtgactgcgtgcaacagcgtatttgagaatttagaacagttgttgcaacagaataagaagaagataaaagttgacagtgaaaagactagtaaagtctgtgaccaaacatccaaattttctccaaagaagagtagttctagttgtaatggagaagaaaaaaagttagaggagtcctgttctggttctgtaagctccacttactctcactcagcactatctgtgcccaaagagatgattaagaagacaacaaaactgattgagactacatccaacatgaactccagttacattaagtttctaaaacaggcagcagataattcagaaatgacttctgctatgaagttatgtcaacttaagtcttttaaatctgtgttggatgatatcaagaaggctcatcttgcattagaagaagatttgaattcagagatccaagctttggatgatgtacacaaagaaaaaaataccaaagaccttaaaagcacagatgctaagtctgaaacaaaattaggaaaaggggaaaaatcctattctacagaaaagagagagtttttaaagttagatgctagatcatcagtaaaggccatagatggtgaagagcagagagcacacaaaagtactagtggggaacataagggttcaggtaggaaagatggctctcagtatgaacccactaacactcctgaggatttagatatggatattgtgtctgttccttcctcggttccagaagacatttttgatagccttgagagtgctatggaagttcagagttcagctgattatcaaggagacggcaacagtgggactgagccagaactggagagctcctctgtaaaattaaatgtttcttcaaaagacagcagaggaaatattaagtcaaaagtcacagcgaaagtaagaaaagaattatttgttaaacttaccccagtttccctttctaattccccaattaaaggtgttgactgtcaggaagtgtcacaagagaagaatggccgtaaaagttctggggtggcccgcagctcagagaaatgtagacccagagaggaaattagtgatcatgaaaacaatgtcacaatacttttagaagactccgatcttcgaagatccccacgtgtaaaaactacaccgttgaggcgacagacagaaagcaaccctgcaatgtcgaattcagatgaagaaagtaatggaactatgaaggagaaacaaaagatgtcaggtccaataagaaaa

SEQ ID NO: 36107 - DNA, 1232 bp, Mus musculus
tttaaaaaaaataatgttatttatttttattttctgtgcattggtgttttgtattaagtcttcgtgcgggcatcttatcccctggactggagttacacagttgtgagctgtcttttgagtgctgggaattgaacctgggccctttggaagagaggccaatgctctttttctttctttcttttttttttttaagatttatttatttattaattatatgtaagtacactgtagctgtcttcagacactccagaagagggagtcagatctccttatggatggttgtgagccaccatgtggttgctgggatttgaactcaggaccttcggaagagcagttgggtgctcttacccactgagccatctcaccagccctgaggccaatgctcttaattggtgagctatctctccagatccccgcttccaacttctgttttagttgctgttctgttgttgtgaagaggccctatgaccacagaaactcttagaaaagaaaatctttagttgggagcttgtttacggtttcagaggtttagcgtggtctgagtatggctgaactccatagcaatagcttagagctacattgtgatctgtaggcagggagggagagacagacacacagagattggctgggcctggcatgggctttagaaacctcaaagcccacaatccagagatgctacacctactcctcaaatagtcacttcctaattaaacattccaatatgtgagcctttgtgagccattcttattcagatcacaaggccagaagaggctgttggggtcccttgaagctagatttacaggcagctgtgaactgaactctggttttctacaggagctcttaagtgctgagccatctctccagacccaatttgtatattgattttcagaatactacttcatcttccccattttgcagaggaggaaacagaatgtgatagaaattttagagcttgtaattgtgttttgttctttctttttggttgagaaaaggtctcagtatgtggcccacgatggccttgaactctgttggtagtcccaattcagcttcccaagtgctaggattgtaggtatggactaccactcctgactccaggaattgaattcctttaattaaagttgtgtgtgtgtctgcctgtggcagccagaatctggatcccgtggaattggagttataggtaattgtaagctgtgacaaaggtactgggaaactagagccctctgaaagcgacc

SEQ ID NO: 36108 - DNA, 1171 bp, Mus musculus
ggccgggcccggaaggtacctctagaaggtgccttttcgccccccgactccagatcctggagggttatcttggggacccctgggcggctgagacggagagcgggcagcccaatgcgggcttttgctttctgagaacagcggccgacgactttgcaggagaagtccggtttttgacgggacatcggttgttgttaccccctgcggtttgggacacgttccgtgaagtagttagatcgtgcttttatttatttgttccacgaggcatgtggagcgggttaacggggattcaccagaagatttattgcaaaggtagaagagagcccaggcccgatgttagcgatcaaatacgtttacgattcaggctgtttttccacgcgtttctgatttgctttttgattgtttggagtagttaatctgaaatggattccgcttttatgcagataccttgcttttttaggcagtttgatatttgaccttttatcccaagattgaattcggtgatttttcttctcgaatgagatgcaagcttggtgaatagtggcaaaacgaaattataggtagcgtggatcataattgcatctgtaattggcaaaatgtgccgttgggtgactaggacatcatggctttgagcactttagattgtagaatttgagaacgagcctatccgattattttctaccttagcaaacagtgcatcgatgctctctttacttagggaaaatatacttcagttctgtttgtttgtttgtttgtttgtttttcgagacagggtttctctgtgtagccctggctgtcctggaactcactctgtagaccaggctggcctcgaattaagaaatccgcctgcctctgcctcccaagtgctgggattaaaggcgtgcgccaccacgcccggcttatacttcagttcttaaaatacaggcacttagttgtgtaaagatcattgtcttcctttatgaatttgtgttaactgacccaagtaaaacaaatctttttttttttaaatggaatattgagcagtattggctggttaataccaggcattcatgctcatttacttacagttcagtatgacttctaggttttacttcatgtcttagttgtctgtatttaaaaccatagttgcttctttgtggatggtgaagctggatactgaaggatttgaaaccag

SEQ ID NO: 36109 - DNA, 3685 bp, Mus musculus
agagactaatatactgatatatattttatttcagctttctgatgagttaaagaggattccagagaaacattgacactggtaatggaaactgaaaaataaaaactatttggtgtttgaagaatgcaactcacatattttatattacctctttttgtcaagtgatctaagtagttaatcattaaaccaaagatgtgtagtgccttaacaagcagttgtaaagatcatgaagtgtttggaattgtgctcctcctaaccttcccttcccaatgaacttaggaaacatttggggtttgtagtattaagtactttataaacatttaaaactactacttcattttacttagagaaaaactcaaaactactatagttaacttgattttatctcatctaaggttggggatggaaggttctgagcaggaatctccacctctgcctattgcaaacaactgcatctggaagccattgttccttttccttctttgtgcagatgtgtgtgctttacagacctttcctcttgggcccaggtatcatatacactgtgtcatctgaaaatggaccgtgtcgcctttggaaagatacatgtcttcctgtgtctttccacctgaaatcagctacatatatgcctccttttacacattcagaagtacctctaactaaagactatgatttgtgcatgagtgtgctataactaccttgtacatggaaagatttctcattctgtttctagttttatttaaagtagcccttctctaacaataatagtttcttgctaaaaatcagtataacttataaatggtctcaaatgtttgtgtaagttacgcattgttattgatttcattcttatgtaacagaaaaataagctgagttgtgttcatggaaaggactcccttagaagaatgagaaaacacaatcatgaaatactgatttgttgcctaggtacagaaatgaaatggtttgccaggctgtggtagatgaaggctgagctctgtgagtttgtggtcagcctgggctacatagtgagaccctgtatccaggggaaaagaaaaaaaaaggaaggaaggaagaaaagtagcatgttttcaagctgaggctggggctcagaggtatagtgcttgcctagcaagagttacactctgtgttcaatcccaatgccttagaaagatttcttgaaacctggtctgtgaatttttccttgttttgataaggactgttccttgaaacctggtcttttgttttttaaaacacatgttcgtaaaacatggggctatttttttaaaataagtgtttcttgaaacctattatggctcttgttttcatttttgtttttgtgtgccggttttctaaaagcaatgttcttgaaacctgtctttgagacagagctctcgctgctcttacctctcttagggagagctgtcccgccttcagctcacattcatcctcctgtctcagcttctcaagtgctggggttgcaggcttgtgccaccattgactgtaatctgcttttgctatcagtttagctttttatttaccccgtcaattagagatacaaagaatggtagcaggcacctgcctctgctcttagctaccctgctggctgaagtagaatccaagaagaccaagaacttgacacattctggcatcatattaacacctcatctcaaaaatatgtcagaaaagaaaactatgaagggattttgtttgaattttatctttttttcctggtagtgaaaataaccatatatgctaaccagttttctatgaggaatatttaaatcatggttataatatggctgactctggctttcaccatagttattaagaataatccagggagctggagagatggctcagtggttaagagcactgactgctcttcctaaggtcctgagttcaaatcccagcaaccacatggtggctcatagctatccataatgagatctgatgccctcttctggtgtgtctgaagacagctacagtgtcttacatataacaataaataaatctttaaaaaaaaataggtttgccagggctaaagagatggctcagtggttaagagcactgactgctcttccagagatcatgagttcaattcccggcaaccacatggtggctcacaaccctctgtaatggaatctgatgccttcttctggtgcacctgaagatagctacagtgtacttacatactgtacattaaataaataaataaataaatgatccaaaatgctactgttaagaaagtgtactcttaggccgggcagtggtggcgcacacctctaaccccagcacttgggaggcagaggcaggcggatttctgagttccaggacagccagggctatagagagaaaccctgtctcaaaaaagaaagaaagaaagaaagaaagaaagaaagaaagaaagaaagaaagaaagaaagaaagaaagaaagaaagaaagaaagagagagagaaggcaggaggcttggagtggagctcagtgctagagcacttaaaaggctgtgggttcaatcccaaataccacaaaaatctaggaatgtaactgaaaaatggaaagacatattagaaactacatttaaaatatagacatggatatgtgactgagttgatacagtgcttgcctagccatgggttcaaaccacaacatcacataagccgggtatgggtgtaagcacatgtgtgttatcccagtgcactcgggagacagatgggaaccagaagttcaccctcatccttgagcatagcgtgagtataaggccaacctgagctacataaagactctatcccaaagacaaaacaaaaaacaagaaaagatactgtgactattccctgctattgatcatgcaatagccttcccatgtcttatataatggagtttatagaaagagatggacataattgacccaggaaaaaaatttgggggtgatttgttgtggttgctacaaatttgatgactagaaggatcattccttgtaaattgagtgattcttaatttcttatctgctattcatgtacttgtctctgccaaatgaatttacgctgtgattcttaggaaactagtgtgaagacttgtcaagttgaactgggcaacactcctactgtgttatctctagctgctggtgcctcccgtggccagtgttttgtgtgttttctccttgtttaagagcaacattcttgtatggagaaaggcttgctctggctaaaatctgtgaaaagcagattttctcatttaaaatagtgttacttttgtggaaattttaaatttagcttttatctgaagtgccttaagtagattcttaatttacttttctagtactggtttgaatataattcattatgtatttttaatatactgttcaaaaatgatacatactatagcaaagataaccaaatgtctggcttactgctttctgtcaataaacttttacaatctaaattacatggtttttttattctctattgtcactacttttctgttactattataaaataccctgactcaagcaacttcaggaagacacggcccattttggctcaaagatggaaaagaatatatctagagaagacatggcagctgcagcatgaagccctcaggcagtcaggaagcagaaggagaataagaccagtgatgtacgctagcaagactgtctctagaaggttccacaacctcccaaccactaccactagctag

SEQ ID NO: 36110 - DNA, 1103 bp, Mus musculus
tcctcttttgtgtgatgctaaatatataacctattttatgctacacagatactctcctgaactccaactctagtagaattcttctttatcaataataagttagtattcgatattaattattgttagcatattagtaagcagatgctataaagtttggagtgtaattattaacaaatatattactaaaatagtaatattttatcatttgaatatagttcattgattttgattaaaatattttctgatatttcatttttggttattttatttttatttttatttacatgtgtgcacttatgtatgccatgcatgtctgaataattatgaagtccagagggctttggattccttggagctagagttacagagacttgtgacctccctgatatagatattgggaagagttacaagtgcttgtaactgctgagctatctctttagatatctcttttaaaaatattttatttttatttatatgtatatgtctctgtgtgtatgtgcacatgtctggaggttcctgaagaggccagaagaaggcatggatcctggagctgcatttctggatggttataagcctctggatttggtttctggcaactgagatctggccctcagtaggagcagtatgagttcttcagttacaaagctctttctgtacctttttggttttgtttttgttctttttttgagacagggttttacttctggcctagcttgcctggaacttcctctgtagcctgcttcagctcctgggtggtaggaatgcaggtgtgagttagtgtagctgactttcgtttggtttgagactggttcttgtgtagtccaggctggcttggagcttggtatgtagccaaggatgaccttgcgtttctgatcctcctgcctttacctccccaatattgggattacaagcattactggcttcctatttcactgttaattctcctgtttaagttttagttccaatttatagccacagtatcttgatagtggcttttaatcacaattctaaatacattttaatggatcaattatatatcttcaaatattgtccatctagagtacatacatttctagctgggtctattaatttgggtcatgaaa

SEQ ID NO: 36111 - DNA, 1220 bp, Mus musculus
tagttaagtatgttgttctgtcattcaaaatatttgtgtttataaactcttaatcttttattttcatgtactttaagctactagcataatgtctaacatataatttgtgctctgaaaatgttcatttctccttttcaagtcaatattgagtataaaaatcatgttttatattactggaatataaagtgaaatggagaatgggttttgtccactccaccacttttctctcttattccttcacacccaacacccacaaacgtttacatttttcaatgctgtctttccagatttggaaaagacctaacttctatcttagctatcttagagaggtgaaacttttgatgaaggtgctattaatctagaaaggcaaacctgttttaatgaagtatgaataagtttatatgcttaaactgtattttaaaccaatacttatgccgtcttaagagtttgagtttgtatatttgtttcttaattctaggagatcatcataatatagctcattggcttctagaagagagagctaaactatagatgtccagtagttttttcttgctctgcatccatgagaacataagtcccccagtcgtcagccagtttctccttctgttctgtatatgttgttgagtcctcctcctgcctccacatcaagttatagggcagtgagaacagcatttcaggtctcactaccagaaaagaacctgttggagagaggctgtattccttagagaggagggtcttttagagaggagatcaagcacgttactttcagttggccactggtttaagtaatgggccactgctcagaacaggttttgtaagtgcatgtatgtgtgtgtatgtgtatgtatatacacatgtatatacacacacacacatacatgcatacagagagagacagccggagagacagagacagagagggggagagagcatacatctttcgaggttctttatactttccttgccactcttctgaattcactcagcaaccgttgtccctgtcagaaggcgccatggacactttgctgtccagtgctaatgcggattcagctaggggccaccttttaacttaaatatccaaagatgccttttgaatttaagattaaaacacagctagaatatttactcttgtagtttgaaaaggatagttgttaggtgtgaaatagaaatgttgcttttcctactttagtatcaccattttaggaagttacatttgatgc

SEQ ID NO: 36112 - DNA, 1179 bp, Mus musculus
ggcggggcgggcgcccgaaggtcctccggaggcccggcattctgcacgcttcaaaagcgcacgtctgccgcgctgttctcctcttcctcatctccgggcctttcgacctcacggtgttgccaaaatgtcgctttccaacaagctgactttggacaagctggacgtgaaggggaagcgggtcgtgatgaggtaattccgtactgctgccctcaagccctcggggccacattctctctggccgtggcaagcacggttttcccatcaccttaagttgcacttatttttcagctgggtcttgggggtcctgggtttggaggttaaggctgttcctctcacctcattggggcggagactgtgtctgagtttgcttttctgcgtcctaactgcttctagcttaaaaagcgaccaaatgtgtcctttagggagttgatcccactgataaagggctcagattctcaggactcaatctttttcccatttctgaagtgcagtttcatctcttgtagcgagaatggacgtagtacttatcctgcaaatctctaggcccctgctgagggaccttgaaaggtcatttagctagtttcccttcccccaagattcttggaccatccgtgacgaatccgaaaccgcccacgtttcattggtcctggtacaaatgatttctttcccaaaagatgttgctcaaagtcctctcgagtggaggtccctctccccaaagaattgtgggtgggagggtgaggcccactggatgaagctctgtatggcttatataacaggcctctgctgccctaccttgcggttggactcctggccctggggtttgcatcaggattgtgacacatgcagggtgtggccgccgggagttggaggcctgtaacctcactcgagaggtggctagagaagcaggatgtcagaactgaggaaggctcccacgcacgtggcacatgtgggtcccaggtcactgacttaacttggcttctcccttacctgaaagaattactagggtgtatgcgtcttctcctttttgcctttcataatgtatacttttttttttttgccaggagtcaaggatgatggttagatacataactgatgggcctggttgttcatgtaacaactataggacccaaggatgggaatttttaagggccattgatggtcgcagtgactgactactct

SEQ ID NO: 36113 - DNA, 1099 bp, Mus musculus
ggacttcatgagctctgtttcagggtctccttagagaaaccaagatgtgtatagggctttgtgttgtcttaaaatcctgaaaactgccaggtgtggtggcgcacgcctttagtcccagcacttgggaggcagagactggatttctgagttcgaggccagcctgttctacaaagtgagttccaggttagccaggactatacagagaaaccctgtttcgaaaaacaaacaaacaaaaaatcctgaaaactttgaaccttttttttttaatgtagttttatttaatgtatgagcgctttgctgcatatacatctgcctgcctgaagagggcatcaggtcccctatagatggttgtgagctaccatgtggttgctggggattgaactcatgacctctggaagagcagccagtgttcttaacctctgagccatcccaccagccctgtgaaacttttttttttaaaaatatctttttttttctactttattttttattggatattttctttttttgaaccttgttgttttttttttgtttttgttttttcaaggcatggtttctctgtgtagccctggatgtcctggaactcactttgtagaccaggctggcctcgaactcagaaatccacctacctctgcctcccaagtgctgggattaaaggcgtgcgccaccactgcccggctgaacattttttaatgagttaaaagcatcagactctggtctttggcttcttcacgttaacatttgagctatctgggtttgttctgaatgaagatctggaatatgggagtgaatgccccctgctggtgatattgaggtttcagaataagcctgaaatacagcagtcttccttcaaccacaggggatatgttggaagatttctgaacacttaaagctaaggatagtgtgaacactgatctataggcagtaggcagggaggcacactgggcctagtatggaatttggaaaccttaaagcccactcccagtgacattccttccaacaaggccacacctcctcatcctttccagacagttcagctggggactaagtatgcaagtaggagtctatggagactattttcattcacacccttagttac

SEQ ID NO: 36114 - DNA, 1252 bp, Mus musculus
agctcctggaaggtaagcttggtctctgtgttttggcttctttgaaggcagggtgaagactgcattctgagaagtggggcaaagagtagagaactttaacttttgggcagtgctgtcactagcaatcacattaactagggtagcgcaagtaaagccgcgcggtgggaggggtaggtaggaactcattttagttgacctgggacccggaatgccatataacataacttctgccatataacctaataaagagctggtagatgtagcttagcggatcttatagtaacgctgtctctgtttgtgctttctcaaaaacaggtaaagtccttcctggggtggatgctctcagcaatgtttagtattttctttcctgcctttggttcctgtgctcctaagtcaacctagtgttttccacatctccatttggtgttagcgcaagattcagctagtggctgagatgtggcaccaggaacccttaaacagttgcacagcatctcagctcgtctttactgcatcaggatttgtctgtgttcttcaagatcccatttaaattccttagtgactaaaaccattgtgcattgtagagggcgtctatttatattctgcctgagaaaggaagtgagctgtaaaggctgagctctctctctgacgtatgtagcctctggttagcttcgtcactcactgttcttgactcagcatggcaatctgatgaaatcccagctgtaagtctgcagaaattgatgatctattaaacaataaagatgtccactaaaatggaagtttttcctgtcatactttgttaagaagggtgagaacagagtacctacattttgaatggaaggattggagctacgggggtgggggtggggtgggattagataaatgcctgctctttactgaaggctctttactattgctttatgataatgtttcatagttggatatcataatttaaacaagcaaaaccaaattaagggccagctcattcctcccactcatgatctatagatctatagatctctcgtgggatcattgtttttctcttgattcccactttgtggttctaagtactgtggtttccaaatgtgtcagtttcatagcctgaagaacgagatcagcagcctctgttccacatacacttcattctcagtattgttttgccaagttctaattccatcagaagcttagattataaagagtctggcctggtgtttgcttataatctcatccctgggtagtgtggaggaagaacttc

SEQ ID NO: 36115 - DNA, 1226 bp, Mus musculus
atcaagagtgaattgctaatgatcattcagatggaaacacaatccagcatgagaaaaaaaatcatgatattgctgcagaattggccaggaatttaatagatgaggacagcaacaaccagtggcctgaaggtttgaagttcctctttgattcagtcagctcacaaaacaggggaatccgggaaactgcccttcacatattttgatcaggacactgtctgccagagctactgctgccttcatacttgccaatgagcataatggtgctctgttcattcacttcgcagacttgctgcctggattcttacaggctgtcaatgactcatgttaccagaatgatgattctgtcctaaaattccttgttgagattgctgatactgttccaaagtatttgcaccctcacttagaagcaactctgcagttaagtctaaagttgtgtggagacgctaacctcaataatatgcaatgccagcttgtccttgaagtgattgtgacactgtcagagactgcagctgctatgttaagaaagcacaccaatatcatcgcacagactattcctcagatgttggcaatgatggttgacctagaagaagatgaggactgggcaaatgctgatgagctagaagatgatgatttcaatagcaatgcagttgttagtgaaagtgcattagacgaaatggcctgtggacttggtggaaaactcgttctgcccatgatcaaggaacacattatgtaaatgcctcaaaaccctgattggaaatacaggcatgcaggattaatggccctatctgccattgacaaaggatgccaccagcagatggaaggaactctaagtgagattgtaaattttgtcttgcttttcctccaggatcctcatccgagagtccggtatgcagcctgcaatgtcagatggctacagattttgcacctggttttcaaaagaaatttcatgagaaggtgattgcagctttgcttcagaccatggaagaccaaggcaaccagcgggtgcaggcccatgcagtagctgcccttattaacttcactgaagattgtcccaagtcactgcttagtctgtacttggataacttggtgaagtacctgcactccatcatggtgctcaagatccaggagatgattcagaaaggcaccaagttagttttgcaacaagttgtgacagccattgcatcagttgcagatactgcagaggaaaagtttgtcccctactatga

SEQ ID NO: 36116 - DNA, 1148 bp, Mus musculus
gcagattgacatcccacttatttttgatcgagaacaaatgcaacatcaggtgtgcttttccttatggtcctgaatcaaacctccctggaacctgctctttttcagttggctctttgtacctgtgtgcaagattttatattaattctgatttgagtttttcacaatcaattttgttttaaattatattacttatgtgtgtttgtatgtgtatgtgtggtgttctgaaaatattgagatatgattttttgcttcatctaatgagtaatattgatgaaaataaggaatgtttggggcaattgtatgttgatcagcaatttgcagtggtgcagtgacactaagaaacccaccagaataggcacagcaagctttcccgctaagcatgcatgtacttgtttgtgtgtgctgtgtgtgcttgatcgtacctacacttgaatgcacatgtggaggtcagaggttagtattgggtatcttctttgattgtcctcaactttatttatttatttatttatttttttgagaggatctgtcactgaaactggagctcaatgatttgggtagactggtagacagcaagccccgggcatattccaatgtctatctctccagaactgtgattacaagtgtgtgtgtgtgtgtgtgtgtgtgtgtgtgtgtgtgttgcatgaccttttgtgatttttctttttacacaggtgctcagaatctcaactcaggttcttctgattgtacaggaaaggcttttctcaccaagccatcacatggacagtgtctcatataggcaagactggcccccaaactcactgtgtagtgggtagtgaccttgaacttctgacttcttccccatgcttacattgcattatatcctgttttattgtggtgttgggcatcagatccaaggccttgttcctgttaggtgcccactctttcaactgaactacatctccaggttttcctgttcgattttattcagtgtttctgtcagagatctttttgatctccattctctccttgaatatatttattagctcttgtttcattccttctacacattttaaatactgtgataacagtaattatatttgggtcaaaattccctaagttttcaaaggatcctatagggctaaatgcatcaactgctattttggtaa

SEQ ID NO: 36117 - DNA, 1273 bp, Mus musculus
gtcactttttttttttatgccttcacaggtttcaacaagcgtgccattgacaaatgctggaagattagacacttccccaatgaatttatcgttgaaaccaagatctgtcaggagtgaaatgtgacagataaagagtatccttgataataagaagtcaggaacttaccgtctgacttggaaaattgaaattgatgggatactcatgctatttactcatacatttactctattgcttatactggaaaaggaaagggaaaggggggagaaaactactaaccactgcaagcgattgtccaattctactttaattgacattgcttgctgttttcaacaagtcaaatgattatcttttctcttgaatttatagggtttagatttctgaaagcagcatgaatgtgtcatcttaccatcctgacaataaagcccatcctctggttttatttaaagcaagctctttccaacatcacttggctagagcatgctttaaatttaaaatatttgaaatttgtttttgacatttttttgtgtgaaacatgtcaaatctcttaccattctttggttttcttctttattatgttcaactctcctgatttcagaagttacatttttgcatttctatcaggtgctgtgtaacgaatctgactgatatgtgaacaatcttcatgaggaagcaattttttactcatgtaatgattctttctcactgatatctgtattgtgaaatccacagaactgtacaggtgctgaatgctgtaaggagttctggttgtatgaattctacaaccctataataaagtttaccgtattcaatcatgttttattttcatcacttgacagatccttaatgtggaaattattgatttagcttttgttaacattaatcagttataaaattatgaacataaatccacttccattcccatctctacatactcatgtttcatgatctcatatttccgattttcactttgtagtaattatgttataaatatcttacaatgttcttgccatacaaattcaactacttactgggattcttcagctcagagcaattgaaaatcttactgtttttcccactttataactacataaacaatgataggcatctgtagcagctcaccaaagatgaacattgaacaagacaatgagacattttgaagttaaattaatttatttagtgtggtggtgtgtgccaagacaagtatgtggaggtcagagaacagctttctcgagtagattctctccttgcatctttacacatgtgccggggatg

SEQ ID NO: 36118 - DNA, 1178 bp, Mus musculus
tctctagctcgtgggactccacccaccacgggttctaaaccgaaacaggaagtgggctaggatccctcgaaacccgctacaaccgccaccctccgcgcgcccaagcgacccacaactcgcgggtccagcccctgtcccgcgtgttacctgcccctccccctcctcccgcccggtgaactcgagagatcatgtcgaacatggagagtatcctttctgttggtcaagatgctaccagggccttgggggctggggaggggggggcgaaggcaggggtgctggggacacgcccaggggcttgaccctttgggcccgcacgtggggcgagggagctgtgatgcggatgggtaggctccagcggcctggggttggccttttttttattttttttatttttcaccctcctcctcgctgcggccgccgcctccgcctccgctgccatcctcgaatgtggggagggtcagaggagccagtggacagacagagataattgagcccgtaccgccccttgttgaggatttctgtcacctgccttatcagtgaatttttggcctctttgaaattgacagggaatggtgccaggacctaggggaggcgactggagtttgcctatggctccaggcggaggtgtaggttctcaaagcgtacgtggacaaactgcttttggcgaactgccctttaatgactgcaggtgactggtgatgaggttgagcgattgctacgaaccctccgaactaactgtgctcgctttctgttcccgctgcattctaatttaacacttgaggaaattcaggttattcctgaagccataaagtccatcagccaaacctgtctggccacttgggcaattagtaggggctaagaataaagcttcctggtgacgtcatgaacacaatttggctttctttttctttttcactacttaaattccatcacagaagctccatgttgctgtaatttttgctccttccaggggttggctttagagaaaaataaaataaattgctttttcttcaactccaagatagcaaaaagataaaccatgggttatggtaactgttctgtagctcgtgttaagctcttttggcgctattagtctataagcctgaagtacaggtaaaaatggttttttgatgggttcaattttatgtcatccagtaaatcttgcagcactagtcagg

SEQ ID NO: 36119 - DNA, 1097 bp, Mus musculus
ttattcattcttagtggtgttttgtggatcatttttgtcctgtttaaattccaactagaatttgtacggtagtacgtaatttgtactaggaattttgtgtactctgtcaagtacttcgtggagagaaaacttgtcataagttgtttctagttttttttttttgttttgttttacaaaatgtcagtttcaatgaaatatgcctcccaaattgtgtactacccattttaacaggagattttgttatccttgggtactgttcatttaaaatgtcaataactaagtgctgatagttctggattgtttccatatgttaagttttaatttatgaacgagagccacccttgtatgcaaaaacataactgttatttgttctagtctgacctcataacatatctcctccttgacagttttagttactaaatcttttatcacattatttctaattgttcaactcaaaattgtcagggactgaatcacattcttgctctgcagttgtatgatgatgttcttcctatataatatctaccagctggtgtttgtagcctgtattggactgtacctccctgggattgttcatctgtaccttctgtgttttaagcactgtaatttttaaaagagctttagagtttacgaaatttattcctcaaatatagtcttaatcaccagaaagactatctgtcgactctcatttttttcaaatgagaaaaatgagtttcagtgaaagcaagtattttgcttaggggcttgtagctagtaagtgagtcaaaatgccttgattcatcagggcaaccttggttacacacgcctttaatcccagcattggcgaggcagcagaggcagggggatgtgttcgaggccagtctgatctatagagtgagttccaggacagccagaggtacacggaaaaaacctgtctcaaacaaacaaacaaacaacttgattcatccaggatacctactagtgttctttggatctgttggcttcctttctaaccgctatgaaacaggctcctaattcatgcatatacatatcacttaaagagaatttttctgtttgcttttggtcctggttttagtatatgtgctgccaaagtgagc

SEQ ID NO: 36120 - DNA, 1081 bp, Mus musculus
aatttgttgccattctttatgggatgtttacaataaaattccaagttgtttggaatcagttgcactctcgctgctttatgccttaattcatactagagataaattaacaagacgaaagaattataagaactacgaagttaacctttcgaactatccagctttagagattgtatcatgtaatctgtgggtcttcttgtcataagatattttattatcattttttttttaattcttagaaactgagttgcttcctatgaaagaaaagatgtttccttttcttgctgatattctttggatcacctttaggtaatcaatatgatggtaacactttaaaatttgggctgcttggtgccttaaatagcagccccaagcactcgtaagttctttattcggcagagcttcttgagttggttagatttcgaatatacttgctgttaaattttaacagctgagctatggatacccagtgttttttatttgaggttaaattgcctgttgactatgaatttattataaatggtgctttaacttgatgtaaatctaggagggagagaaatgaattgagctggggtctgaatgttttactaggaacactcatccttggccttaaatctataccctcaagttttctcccaatgtcaaggattctactgagttcaagataaataagcttccaaaagactggtccgcatcttttatatgtagcttgtctgttttgtgtttttagaattgagaagagtttttgaatagttcacctctcttctggcattagatcagctgactgacagcccaattttcacaatacccagattgaggtcagggtatatttgtgttatttttgtttagctgtttgactgctttaaaataacctcttttattatgtgaatatgttacattaaaaattctttgttagaaggctttcgtattttatttacccgctagatttcttaaatggaaaaattaaagaattcttatgacaaaactttattgaagtattcagaagattgtttgcctcattgagaagatcaagggggaagagtgccctttgctttctatattatttatcacttactccttaaag

SEQ ID NO: 36121 - DNA, 2410 bp, Mus musculus
ctcctaagttataagctgagacttctcaataatcatattggctctcaaattaatagttgtaattaaccagctttcctaagtgttatatgctctaggcttttatagaacatatttgtgtaagtagacttgctctactgcatagatttctctgctaccacttatctaacagctgtgagttactggttttcatttgaatcttaaatagtatcaaagtacctaacttgagctggaatattttggctagctaatacttggaagcaactttaataggttcttctgttctcattccaaagggttcttctgttctagacttccagaaaagagcctcattgcactgcaaacagatattttgaatcgttattttatagttgaaaaacaaaacaaaaaaaaacgtttaaaatcatgtatggtcttgtttacagcaatagagtgcacgtgattccacaagcgagcttcagttccaagatcaattttattcctcaaatttgagatagcagatgtgctacgttgttacataaattcttgaagttggagggggataatagttgatctctgcttttgtaacagcagttttgttacacgtagatcagacagacttgtgtgataaaacattttcttaatgtatgcctggtaatccaggacatttcttaagctgatgtgtttgtctcatgcttttaatcatttcatgcatctgaaaatctgttaagtgcagaggaaggagtacacacataactttgcttattggtggggttgggggtttattcttgaattaatacccttaagcaattttcacttgcagtagaaatgatgttcaggctttaagaaaatataatgaactgttaatggcactaatgtctgttgctagagagcagaccaagctgatatttttgttgtttttcttcactataccaaaactatttctggttataaactcaactgccattttagccatagtatagagtcaaactgttcccatttgagagtctacatttgatttttttattaaaatatactatttcagttattcatctcttgggcatttagactaaattgtgcctgtgttttcctggagtcagtaacattttgtcctataacaatcaacatactatagttgcttaaattcctggttatacccaaatgtatatcatgtgtaccattttagtatgaaattttggttgacattcttctatgaagagctgattcttgagatgtagaagaattgtcatttgtgtgatattagcagtctggagctttatttataatttattttgaaaaataaaaatgccacatttattccccaaatgtcaagattttctaggcttacataattagaataataaggctaaagacatttttaagcatattttatatgtagtgaaatactgtgaaatactagtgaacagcattttgctgtgatgttgatttcagtcattagaatttaaagagttagtcaccagggtatggtaggtgagcatagttatcatttattataaatcaaacagatacttttctgtttgcatgcaaactattttcataagtgtgaaaaaggtctggaaaataatatttttacttttttaatctggacttccctttccccaatttatattttagtttttttaataccacttcctacaaatgtgtcataatttgtatcatattgaatacttttatcatttcagttttctagagagcttttaaacctaaataagatctgggttcagccatagcaaagaaagtaggaaatgagttaagaattctgcacatgaagaccactgttaggcccatgaaaacacacacatgtagagctttaatcctgtgctatatctgaatagtcagtaagctataatatttcatgaatgctagtgttcagattccaagcttcatgaccttagcatgtgtagatgtttataaaattgaatcatgtgtttcttctctggcttgctgtacatatctcagctagcaataggaggctctccaaaacatgcacaaacccactagcctaatgactaaatttgtttttgtaaaagtctttgtgtgcttgtatgtatgtagcttttttctagtttgacataccttatcccagacattaaaaagagagactattttcgatggaggacactgtctaccaattatttgcctctttagagctcagcctgtgcatttcttagcgcttaatcatccatgtcattatgtcttctagatgacaattttggttttgtcacgtgtgtccctcttttcttttcatttaattttggtctttcatttgtttgtattttctctttccctccccagaaatcaggcttattctagaaattgttcctaaggtgcttcctttgctccagaggcaaaggaactgagtaaaatgctgaagtttccctctacacactttagttctcctatacctaaatta

SEQ ID NO: 36122 - DNA, 1190 bp, Mus musculus
attcaccttgtatgattttactttcctatgtccagttgtagaatgaagatacaaaattagaaataccaaagataataactcataatttttaggttgttcctcattctcaataatccaacaacttctcacgcagtcacaattccttattgcttccgatatcagtttttccagtgagtaagctgtaccttccttctaccccgtggtggcttgtagcttgagttctggcagctgctatgtagtagcctaacagtgtgacaaggcctactacattagtcacctcactttacctcactgtactagctcacataatcccaaaaagaaaggagaatatagtagtgcaatggaagactttaagagagaccatatcacaaacttgtagtattttatattttaaatgttttattatattatttctaatctcttactaagccatttataaaattcacgagttatgtatgacgatgataaatacaattttatttctggttttttttttaagaaatacgtcataatttgaatgggaacagagcttattctcatggtttgtttgaattcattataggtgatagattccgcagtataatagatgatgcctggtggtttgggactgtggaaagtcagcagccttttcagccagaatatcctgatagctccttccagtgttacagtgttcagtaagtttagttcatttgtgcttttgacaaataagtgttccattatatcaacttttttcttgtaagatgtttttctattacatcattgtatcctttcctgtagattaaatttaggtataatcttcatcatcaaaaaaaaatgtaactactgtgaagagtgggcttctgccctcttaacttttcattggtgtagcatattttctctatcagtggtgcattgctatctttatataagctgagttgtagtgtcatgaatattatgttgctgttttctgaatttcaccctcaaaaaataatgcaaattatgttaccatatgaatggaaatgcttgggaatgtgatttgcatcttcttcttttgttgatagctgggacaataatgaaagagaaaaaatgagcccctgggatatggagccgattccagatggaagtaaatatacctttaaagatgaattatcattcttagaaaagcaaagtagtaacagtttgatgttgaaaacttattgttttgggttttt

SEQ ID NO: 36123 - DNA, 1279 bp, Mus musculus
gaagatggaaaggaatatctgcatgaggaagatggagaggaaggtcagcctaaggaagatcaaaaggaaggtcagcctgaggaagatggaaaggaagatcagcctgaggaagatggaaaggaaggtcagtgtaaggaagatgggaaggaaggtcatcatgaggaaggtggaaaggaagatctgcatgaggaagatggaaaggagaaagatggtggaaaagaggatagaaaggaagaaggagagcaagaggttgctgtagatgaagggagtgatgaaaacaaggtggaggcagaagaagaaggagccgaaaacaaagacttcaaacaagacggagagaaagaggagcctctgagtattgtctaaaactgccctctgtgagatcataattcggtaacacgtaccttcctgttgtaatgttaatagagataaatatttttatcagatattttataaacagtgcttttctttagcatcattcaatcttagatcatcatcatcatacaggttattagttgcaaaatgcctaacatgacacctttatacattttgtgattatagtagtgcaaaatataaaatgtatacttgcaactttgtgaatttcatcatgtgtaagttatgtattaaatctttgagtttcaattttattcttatacgtggtaaatttgcagagtaggagaattccaaaagaaagagtttggcacaactttgatgtagttctctaggttgcttttataaagaaggtcaactattttcaggtaatgctaagagtcggaattgacattaccaaatacaactgtattagtagcttggaaagtataaaattttaatttcatttttgaagaaatttgaatgtttatttcaggagggcagttttgattatatgtgtatgcacaaagttttgctggatttatcataataaaagagttccacaaatatgattatggtttgcaatatttcaaaaactgtagtttaaagaaatattaatatccctgatttttttctcccatttggtgttcaggaaggcatttgaggattttttcattgaaatataattataaagcataaaattcaatattttaatcatttaaaatatgcaatatattggtttaggtacgttcattaaaccattcattttttaaaccattcatttttataacaaggatatttattctattcagtcaaagcccattttatttttcatgaatattcatattgtttctaatggtatcagttacaaatctgcagtgaacactcactagtttttgtgttctgtatgaac

SEQ ID NO: 36124 - DNA, 2299 bp, Mus musculus
gaactgaaaggagcgagagaggagagagagagagagagagagagagagagagagagagagagagagagagaagagagaagagagagagactcttattcccacaatgcctcattatctttagtgaacatgaatattttcatgtgatgttactgttgttgaaatgtatttacaggttatgttcatatgttagtcattgtaatttcctatgctgattgtgacattctccttcttttatcaaagaaacatgtatgccccgaaccacaagttttccaggcttctagatgtaacctttcattgcacagccagtgatcaaaatagctggcttcccgtcagacacacgttgagtgcatttaactgataaattccttgcttatacatgcagttatagtcatgtttctaagttgcttgcctcagtacaatgtgggtatataagtcatggagaaaagattgcagttcactttaaattggcccttccttgcaaagaacacagacttttaattaactgttatatagtatcttgcccttcattgtttaagatatattttcttttggtgtttgctgaacgaagtagtagtggctcttgtctcctgctttaacactgttggtgatcgtgaatgatactgtccttaataggtaagcttttagtttcactttaggtagactgtgtcaacacatccgtccaagtagaaagaatcactaagcacacattgattttttgagaaagtacaagtatcaaagaaaagcaacaacgtttgaagtagtttgaagataagcaagacccaaagcattcaaccagaagatgttgatattgtacctttttcccatacttgatttttataaagaaacacacatcttttacttcaaattactattatcatcatacctgctctttcctagactgtacttggcaaaaattcaatatgtaatggagccatagcttagtttactgaaactcaaacgtgaattgatgctttaacataaatggttttaaaatttgcgctactcaactctaaatgttatacagtaattttgatgaataatttttgtttataggtgtttaaaaaggagaaaaaccaaaatgaaccaaaccaaccaaaacaacaataaaaaacaatttgaaggcaacttttagtgacctaaactttgaagtatgaattggagtcaaaactattccatttcttcttccttttttttttttaattgttttggggatctctatggaagacaatactttaaattaattttggagtgcaaaatacttttagccaatgttttccctcatcattgctaaatgctacaggtaatacctgcagtattatatgtggacaatgtaactttctctgttttgcattggaggatgtttatgtctgtgggataataccctgaagtctgtagatttaaagtacaagtttgaattgagtcttctccaattgaagcctgtcattttgtcaactgagaaacattcctgatagatgaaaggaaaggaaataaaagtctaagaattaaatgagttttgaagaaacttccacagtatatgcttgggagtgaatttcttgttgctttgcataatatgtttggcatatttgtgtttctaaatgagacttggtaatttgtaaatttcacatttaagagctgatttgccctttagaaattttgttctttagaaagagttccactttcaaaaacactgtaaattgttaattgtactgctaaatgtggacacttcattgggaccctaagtatatgtgaatagggaattttgaaacaaagattacttttactgggaaagactgagtacagggagttttggtgaaatcagacttcactccttaagtaaaaagaacaacaaaatgtaaaactcacatgaatttttgttaagcagttgttggtgtttaaaattacaaagtacaacattaatccttttctatggaacactgattcttttcatctgatgaatttcaataaaactgattaagtgattcatgtttgattacttttaattttctggtcttctgtctctcttcctcaattcttgtttctgaatattaccagtcatcccgttgtaactaattttcattttaaattaattgtaattttaacatttctttagaaagagtaaccattcttggggttggggagatgacagtttaagagcacttaaggctcttcccaagaaaccaggttctgcttgcagcacacacatggtggctcacaactgttaatgtaatgattattttgctatgatgttttttaatatgttcattgaggtattttatataccttaaaatttacctattta

SEQ ID NO: 36125 - DNA, 1521 bp, Mus musculus
ccaccttcttgagttctttatatatatattggatattagccccctatccgatttgggataggtaaagatcctttcccaatctgttggtggtctttttgtcttattgacggtgtcttttgccttgcagaagctttgcaattttatgaggtcccatttatcgattctcgatcttacagcacaagccattgctgttctattcaggaatttttcccctgtacccatatctttgaggcttttccctactttctcctaacagactttctagaggaacctgtagaggaagcacctatgtccccaaaccagtcagctgggctgatgaaacagacgatttggaaggagatgtgtcaacaacttggcatagtaacaataatgatgtgtacagggcgcctccaattgaccgttccatccttcccactgctccaagggctgctcaggaacccaatattgaccggagccgtcttccaagtcgccaccctacactgctttcctagagaatctgccctacaatgtgacagaagactccattaaggatttctttagaggattaaatatcagcgctgtaagcttaccacgggaacccggaaatccagacaggttgaaaggtttcggctatgcagaatttgaggacctggattctctgctcagtactctgagtctcaatgaagagtctcttggtaacaggagaattcgtgtggatgttgctggtcaagcacaggataaagacagggatgaccgttcttttggtcgagatagaaatcgggattctgacaaaacagacacagactggagggcctgtcccgccacagacagttttgatgactacacacctagaagaggggatgatagctttggggagaagtatcgagatcattatgattcagaccagtatcgggatgggtatagggacggatatcgggatggcccacatagagacatggaccactatgggagctgggatcgctatggtgaccaaggcatcagagactatgaccgaggctatgactccaggataggcagtggcagaagagcatttggaagtgagtacctgagagatgatgactacagaggacatggggatcactatgaagaccgctatgacagacgagatgatcggtcctggagctccaggaatgattactctcgggacaattataggcatgatgacagagccccccccccccagagacccagactgaacctcaagcctcgcagtgctcctaaggaggatgatgcctccgtcagcacctcccagtccagccgggtggcctccatctttggaggagcgaagcctgttgacacagcttttagggaaagagaagtagagaagtggctacagaaggagcaggagaagctgcagcatcagctggatgagccaaaactagaccgccagccccgggagagacaccaaagttggcgaagtgaagaaactcaggaaagagaatggtcgaggacaggaagtgagtcatcgcagactggggcctcggccacatctggcagaaatacacgatgcagagagagtga

SEQ ID NO: 36126 - DNA, 1221 bp, Mus musculus
aatgaagttgtcttccttatctctttttagtagttttggtttgaacaatattttcttaaatagtagactatctcgatctgctctcttagttctatctgctcagatacacctgcatttcaatctgtgctgctcagattttggcaagctgagtcatctaagaagaggaaatcattgattaagggaaattaagagaaggtctttatcagagtgtcctgtaggcaagtctgtgggaatatctttttgttaaccgatgtggagaggcccaggctactctgagtggtgctaccagtggacatgtggtcctctgttgtataaaaaacaaactgagcaagcagaggaggcaaaccagtaagcagcatttcctgtggtatctgcttcagtttctaaatccagtttcctaccttgtgctactgccctgacttctcttcatcctggtctttaagctctatgatggggaaaaataaaaactcttatgctccaagttagtgttttataacagcatctcacttcttggccttttggctaagatcaagtatagtatctgttcttatcagttcaatatatgatatgtcctctacccaaggacaatatattaaatgaatttttggaagtagaagttggaataggagcttgctccatccactccatgaattggcctggtattgtagtacctccaggaatggtgcaccccttccgaggaataaaaaaaaaggaaaaaaaaaaggagaaaaaaattttatgggatatttctgtgggagacctcaatatgtttagtttgtgagaattagagaggtgtttggaacactggcttagataagccattgagtgtttaaaggttaaagggctgttctgtggaagcgtggatgataaatgtatatagagaaatataggtgatgaaggcttggcttcagaagtttcaaaaggaagaaaagactatcaaggctgtttgtttgacttatttgaattaagaatctgtagtttaactcacagacaatatgaagttcaagaagaaggaaaaccaaagtgtggatgcttcaattctacttagaatggagaacaaaataatcatgggaggtagagggagggaggaaccagtaagggagagggagggtaaggaaaagggggggcaggatcaggtgtgggaggagattggggagaagtacagagggtcaggaaatagaacagaggtgtgtagcagtgaggggtggccaacagggcact

SEQ ID NO: 36127 - DNA, 2018 bp, Mus musculus
gcttgtaagagtcttgtgctcttcagtcctcagctaactggatgaagagaaaattaaatgtgtgttgtggattggctttgttttctttttgtctaatctcatatcaaaggtattttgtttcctgccacattacttgaatattctgtttaagcctcttttggagaggttggaattttaaatgaacatacataggtccataatattcatactatgtcattgcagtagtgtccaaacgtttaactatataattgatgtccacaaggtcttaacttctctgcacattaactttccaaattcctttcaaataaagttaacctgtttttttattattttacacaaaaatggtttaggaattcattaatactaatcaagatgcttttcatatgttataatgataaataatatcagtattttaacatcatttcctaaaaaggaacttttgttcttaaaagaacaacagaagtattctaatagcttgtgcatagccaaagcactccattcatttgagtctgtttagatactaaatgtagtaaaagtagtttggtgcctgagcaaaatacattcgtgctaatatatgaattcctgatatggttggtgccaaagttttgatagattaattaaatcactaataatttgtgcagacagatttgtatattatccataagtgacttcaactaaagaaaggttccatacagcttctaatgttttacagctaataaaattgtagtgaaagtgaaaatgtttttatccaaaggtttcatgttggtgttgtaagctcctaaaaatgtcatagttaagcctttgaatatgcacttcatggtgttgatgcgatcttggtgttacctaagctgactttgaagttaatcaattgaattcaaccatcgttgttcccctttataagtgaagctactctgttgtattcctgatttccatgtggtttgagctacagtgtagcatattgagctaccttgaatcctatggcgatgtagttgaagttttattatagtggacttgtgcacttagcacatatgatacaatataatgtatttcagtaagcatcagacaattctatatacttcaagaaaataatttcacattttaaaaaggaaacaatattaatggttgacacagaaatttgagtacatttaaaaatcatttataataaactggccaaattggtattattaaatttatgattcagaaccagtgtgtaatgtgtattattttcttcaaatgctgaaaattttaaaagtcattttatattgttaaggaaaatatcattagctactactactgacagaatccatgaatgtaagctggcggataggagttttgtttagtgtgtgctaggtgtactgtgtgcttagttcagagaactgattactgactatgtgacgtagactaggagacatgtaatgttggaatttaataaaacgaactgtctgtattctcttcaaactgtaagtgatccttgtccatgcacaaatatctgtttcctacatgtgatatataaattctgtattcttacttgaggtgtcttttttaaaatgattggacattattaaacaacagctgatctgataccacacaacagcatcatttagtcttggtgtagtattttgtctttggtgtttcaatttggttaattttccccctttctttttgttttatcgcaataagtacttgcatttaaacagttgtattcctacattcaaattagtgtgctcttgtcatgatcttctttgtgctgttacacatccttaccagttgatttgttgaagtcaaaaacattagtttggttttgactttttaggacacatactatgtctgtatgtgctttccagctaattagagaaaatgaacctggaaaatgaaaagtgaaaataaaaataccttttagcctttgtgtaaacaatgtgttaaaaacatcataattttcagttagttcactcggaacattaaggattaaccagtgcgcatgctttctcatccttcagtgagtattgactgtacaaaag

SEQ ID NO: 36128 - DNA, 1146 bp, Mus musculus
gccctgactgtcctggagctcactctgtagaccagactggccttgaactcagagattcccttgcctctgccttcccagtgctaggattacaggcatttggtacttctgtcttgctataaagactactcttaattctagggtaaaaggcacagatagggaaacctatccataacttcctgtttccttcttcaaccaatgtgtgttacttatcagtgtctgtctgattttctaaattatcttgaacctacaagctttttgccttttgttatattgagtaaatagttggagtgggggtggggcactagataagaccttagtaggaccaagatttgaagttggaaagaatgagactttttactataaatatatgaactgctttaacaaaaatttagttatacaaatataatgctgttttcttttatgttcaaggtcgttcatcgtgatcttaagcccagtaatattttatatatggatgagtcagcccatccagattcaatcaagatctgtgattttgggtttgcaaaacagcttcgtggagaaaatggacttctgttaactccgtgctacaccgcaaactttgtagcacctgaggtattctttaactattactgtggatctttccttgttttcctagattaagtctttatggcatcaaacatgttggtgaagacaggtaaaagcagagttgccttttttctcaactaagaagctctttttctaattttgaattataataattcttgacctaaagagttagttactagcatctaaaacaaatatatcttataatcagagtaattggtgctattaggctatttactaatatagaaatcatgatttcaaaacagggttgcatcatatagctctggctgttactgtagctggaacatataacatgtctcctgtgtttgtctccttatagctggggttacaggcatgtattgtcatgccttgctgagaaccatttattttagggctgagatatacttttagattgccttagaaggtgtttttgctttgtttttaaatagaaacattgtctttttcctgataaaccatttctttttcctgagggaagagtcaagaaaggtgaggctggaaaagtttaggaatatagattgcacttttgggatgctctctgatatt

SEQ ID NO: 36129 - DNA, 1174 bp, Mus musculus
acaatttaaaagccaagttctctttgaaaactcaatgtctctttaaaatttcaaagttgctaaaatattcaaggtctcataactgtggattcccataaaataagaaaacactctaaatactttattgctccaagaaggaagaacaaatgtatagtcacaatcaaagcaaagcaaacctgacatccagcagtgttaatcaaatactgtagctgaatgacccacagctaggattctctcatgatcttctggactccacagaacccggggcaacttcacttctttgtctctgccatccacaacacacctagttcatttcacagtctcaagttggctccattctaaagctgttgctgtttttgggggtcatcccatggcactggcatctccaaaatgctgcggtgtccacatgctgcaccttgacaaatgaactctcaggctttcttcagggactccagacctattacttggtgccaatcctcagccttttcctgtaagcccttcaatcctggggtttctactacaacagagggtttaccttcacaagtgacctctcctggcctttcatagtgccaaagtccagtgcttttcaggactccttcatgccttcaaatccagtaccatgatatactagattatacaatgcttatacattactaagtttggctaccaacacgagatacaaccttgttcccctctggaccacagcttccacatactgaacctgagagaatattcccccaaagattttgcctcaatgatgctgggcttttattaatcatagttaatctctcagcctgattgtctcaagagggcaaaggtttcattgtagtggtgctggtctcttgttgatcatactgactttcacccccagctgaccaaaacccatgtattttatttcaacttctctcttgagcagcctagatctagtctttgctgggttctcaaaacttcactctaaaacttaacaagccaggcttccattctctgcatcttttttcagcattatcacagaacagctcattaagctctaggtaatcaatggcttttccagcccagtgtcacaaaacccatcatagtcttcctaagaatggcatggtcaggtctgtcacagtaataccccattataaaacaccacaacgaaagcaacttggagaagaaaatgtttctttggttt

SEQ ID NO: 36130 - DNA, 1193 bp, Mus musculus
ggaaattgccaagacactttatgtgtctgtccctccatgatttcctatacggtgcagcacataactgtcttaggatgtgctatgtatttctacttgccttgttttcaatttcacccatgttaggctcatagtgagagattttatgttttgtctactgctatattcccaatacaaaatataaatatcttctttttcactttcatactttataggtactacacagttcattcctgaccccaagctcatggatcatgggcagtctcatccagatgataaagatatgtacagcactagaagctgaactagtttgcagagggagcctgcatagagaactgcaagatgtaccaagttgcaaacaatggtgaaaaatcacataatgaacgggtaactgacaaaatgtgacttgaaatttttccacgacattttcaaataaacagtttggccaatgatacaagtggtaaaatcataaattaatgaatgcaacataaatattattaggtgattgatgtgggaactgaggtagaaatgctagaagtacatttcatgacttgtaatagaatttattagaaagcaaaatgaagtgaagatatgtccgtaagactgaattctataaacatgcatatgtatgtatgtacgtatgtatgtatgtatgtatgtgtctgcttcagttttcccaattattgccagttaacttacaatgggggtagacgaatgagtttttcacttgacttttttttttttagagctagaataaattatccatattttattgcacacgagctttgtttatttattttgactactcttaaatgcttgaaaacatctgttcaaatgggatcactaggatactatgtgatgctagtactcagtcgcaattttgctactgattcctgggtgttgtgtttctctgcttcactctgcttgggcctttaatcccatcaaacttgcctgttttcgattccatagaacaaaaatgtccaattcttaggtacaatcattcccactagccatctatcgtcctggttactctttgcagtccttctttgcaccctttcctaagactagtgtttcttctcaggtcctgatttccatcttttcaggactgtgtgtcatcctgtttaaccttcaatctttgttttcttttatcactcagttctcttcctcaactagtaaatagattgaccttaaaagaa

SEQ ID NO: 36131 - DNA, 2106 bp, Mus musculus
ttatgtggtgttcacagaaatttgttcgccaattgtgatctttttgttgttgttgttgttgaaagccacatctggagagtcagctcacatacttattttggttatttgaattatattttcaatctgagcatgatataacagataaaagcatgtgtaaatacggtagaataaagctaaactatcatgaactggccaggagcctatatttggagtaaaagttggttttatttcctatgttaaaagctgaatatgttaatactaaggtgtttagacattttgctaattttaatttcttagtaattagtgatttgtatataaatcacatacacaattggccaaacttcaaagattaagaaatagaagaatacaagcaaacatttgataggatgattctactgagtcaacggaagcactaagtccttatccacagaactaatttcatcatagctgtgttactcaaaatattaggcaaattgttaaacttatcttcagtttctccagatatgaagtgaaacatgcctcctataacagagcagtcttgaagatcaatgcagcactaacattagaatggttcttctggacattgatctgtggaaaaatatcaaaccaacctcatgatcacagtgttatatttattgcagtaaatttttaatgccagtctgtttcctaaactcattaataacaggtggaatggtagttcttgaagtcttaggaatactttataaattaacgttcctcttctggcaacaaaaccatcaagacctgaacagagtgtagcaattaataacctgtaatatacattttacatgagaaaaatgagggctatccattgacagaaaacctatttgcaatgcctacatttaaatgtctctaagctctgatggtctactttcttgagcaatagtttagacctagaactgcctataaataaataaacaataaataaacgcaatgcttcctgtcagggagccatggctccaaggaaaagcacagaattctccatgtgcagctgcttccctaacctggccaggtttcagcgatgttaaagctcccagcacagattcataagaaatgtaaaaatccaaggaatgtagctcttgctgacccttgaagaaggagttggattgagaaaatgggaaaaatttcccagacttccaggctgttcctctcaggttgcctgtacctcccgctgtacagctctctcctctggggtatccaatcctttttataatgtcacacaaatcagggacagaatcactttataacctactttgtcacaaagcttcagctcttatgtcagctgttgtttcctgaagcccacctagggcatgcactaaatgccaagtacgctcctgtaatgcaccaggtactggccctgcctctccataccagcaatatgaaagtttctcttggatggggacgttaagttggaatacaatcacagttatgtcacaccagtaaaagtgttatactttgttataatcttagagttaaggcctcctaaatgtagaatgcacatttatctaaggagactattaagctagatagggttagaataattagaagaactagacacctttggacactgcagctctgtacattgtagaacaacacagaaactattttttatttcatggcccagcgtacacaatatctttttttcatccttttggtgcaatcagaaaaaaaaaaaaaaaaactctcttccaggtcatttactgagtatattattaaaatgcttaaagctcctgaatatgattaataatgactgaaataccacaaaattgttttcaaaattgtagacagacctatttcttgttgcctcagagtgtcatactaaacctttgaagagcattttcttttgttttcttaattattgcttaatacttggttttactgtattaaggtcaaaacaataccaacaacaaaccttaaggttgtattataaaaccttacaacacaatgtttgctgttttacacaatgcaaacatttcagtaattttaaattttgaagttgctggtatcaaaatttttttatttgtttgttgaaagtatttaaatatgcatgcctgtttctggaaacgaaaaatggtatatcattaagtg

SEQ ID NO: 36132 - DNA, 1141 bp, Mus musculus
aggcgctgattataaatgctgttcttatagggaccagcagcttctcaagttctatggtaagggaagagatggctgtttttcctacaaaaattggattcatcagatgacaaggtgctcctctcttgaaattacagctaaaaaaaaaaaaaaagaattttgtttggtttaaatggacaaatgtatacgaccatttcatttttgttcctaaatagtttcaaaagtataaatatgttttatatgtcttggttatagattagtggctcataagttatttgttatgattaaaaatttgtaacattggtaacaaaaagttgacttaaaactggtaactctgtgttagagtaatttagaactacaacatgcagcatgagacaacccatgggaacaggtctctaaagatacgcctgaattgggtaatattctgtgtaattcttattctagaaacccgatttataatagatatattggcggctacaccttcttgtgtttgtgtgcaggaacggacagccaaactttgtagcaagtaatgtttttggagttcatttttaaagaaaatagattgtttacactgttaaaattgggttttgcttctcaaaattgtggttgtgctctcatgttacaagagaaattaaaggcttctcccgaattggagccaccagctaaatcggctcctctaaaatctataaagcctcctgagtggcctagtccacaaccttccccttatccacagcctcgaccccagccgccgacggggcgttgagaggcggaccactgtgagtacatggagccacagggacccgcagagcagagtacgggcggactctggtggacccgcccaaactttaaacccttcagtactggtcattttcctctgctggtatttataactggaaaattaaccaccccctttctcaggatccccaacgcctcacagggttggtggagttccttatgttctctcatcagcctacttgggatgactgtcaacagtggttgcagatgctcttaacaaccgaagagcgagaaagaattctgttagaggctagaaaaatagcccaaaagccaacggtggtctacacagctacaaaatgagatcgacatgaaattccctttgactcaccccagttggaactgcaacatg

SEQ ID NO: 36133 - DNA, 1135 bp, Mus musculus
atataaaataaaatataaaaatggtgtatatcaatatataaatacattgatatctaaaacacaaagactcaattactataaacatacatgcatttggcttagctaagatttggttaatgatttaagttaaagttcatcttaaataggaaagaaatcagagatgagcagtcagtcctcaaagattatgctatacctagaaataaaaatactggaactataaatatgcttttatatataaatcatagacttagatctgtaattatttttacgtgaaagggaattataggctttaccctaggtccctagaatatttactctcatgttcttggttacttaagcagtgtcttctgtgttctatatggtggagtgggccttcagccaaatcagttattgattggttactcctacaagctttgtgctatgactgcctctacatatttttgtaggcagcatactattgttgataaagagtttgtggctttcctggctggtttggtgtttacttttctcttttcttagcctgctgagtatcttcctctacaaagatactaaaacaatgtaaggatggaggttctgtaggcaccaccttaatatctccatattcaatgagttgtattagcatcttcagcaactgagccttgctgtcaatttctgaagagaaacctgtagtctcagcaacagcctgggttgtttggggatcccagtgtatccccgttgggcaactcaattatatatagctcaatcctggtatagaactctttgtttggttacaagagataggcagttgggactctgtctaactttattatttgggagattcatttagattcccttcatatatttatgtatttttagaaagtttctaatgtattgggtttccacactatcccttaaatgcatataattttagctgtctctttgcatattaccctctcaaccctccttacttgattggtccattccagtctccccgtttatccataattacctactctccctttctgaagtagatctatttgttccctctagtcccttattctctaccttctgtgatactgcaatttgtagctccattatcattgatttaacagctaataatcacatgtaagcaaatacataccattttagtatttct

SEQ ID NO: 36134 - DNA, 1191 bp, Mus musculus
atcagagctttttgttgtctaaatgagtgacctttgcttcattccacctgctgtcccactgtgtgagactgcacctactcatcactgcgctgacattctggcaaaagaaatgatctgaattatcagatcagccttggcctgagggtacgagctggtacactgatgacagtagcctcgaggttaaaggtaagcagaaggcggggacagcagtatggtggtgaacagaaagcaagtgatctaggccagcagccttcctgagggacgtcggcccagaaagctgaacttgtgactttaagacaagctctataaatggcaaaagaaaagtctacactgacaacaggtatgcttttgccactgtaccggacaatatacaaagagggctgttgacatctgcagaaaaagaccttagatgctgtggctaaagaaaatcagatggcagatctaaccgccaagcaggtggctcaaggaacaatgatcctggcagtcaaggagtctaaagattattatgacatcagagagaccagctttagatacaccgctgagcactatcaagctatggacagtatttggcttggcctgggggccaaaaaattcaaaggtgtggttaggtcctttgactactatgttacaggactctctgacttggcagaagaaatagtcaaaagcttcaaggcctgtgctataatgaggtagaatttctaaaagaaatcttcccaaggtaatagacctgcctttgttgcccaggtaaatcagagactggccaagatattagagatcggttaaaagttacattgtgcatgcaggccccaaagctcaggacaggtaaaaaaattaatagaaccattaagggatccttaccaaattgacagcggagactggcgctatgattagatagctctcctaccctttatgctcttcagggatagaaacacccctggacagtttagactgaccccgttataaattactctacagggggcccccctccactggtaaaaatagcctttgtacatggtgctgacatgctgctttcccagcctttgttctctaggctcaaggtgctccagtgagtgagacagcgagcgaaaaagcagctccagaaggcctactcaagagaagaagacctgctacattagagtctccacacagaaaaccttaagactccggtggaaaggcccttatcttatactc

SEQ ID NO: 36135 - DNA, 1164 bp, Mus musculus
tttcttctaataaaaagatgggcgccacggtcctctacccctgcgtggtgtatgaccatgggcccgagagcactcttgaataaaaatcctcttgcaatttgcagcaagacccgtttcttgtgggtgattttggggtgtcgcctctcctgagtcagaacgtgggggagccctcacattgtgggtctttcatttggtgcgttggccgggaaacgcgaccacccctcacacccgagaaccgacttggaggtatggggatcccctcttgtgtgcgtgtgtgccagccggtgtctctgttttgagtgtctgttttctgaaacgaacattggaacatgtgcttgttgtgttgggttgtttgtgtcttgtcctatgtttctgaagtacggggaagtctgagtttggatccgtctgagtttattgaatttgtgccttggttttccggttgcgagatcatgggttcgagtcccacctcgtgctttggttttacacctggcagaatgagaaacaagtgagattctctggttttggttgtctaggtagaagtggacgacggtgtttgtagacgatggggtgatggggttttctgaaatgtgcgcgtctgtatttgcagctgtccttttgggccgtaaggaccggaggactgtggtcggcagatgtgctaagaggaccacaggctgtggccctgggggacgccctgggaggtagggagagtcagggacgcctggctgtctccggagatcggtcagagggaccgagttctgttaaagcagaagcttccccctccaacatcgtctaattcttttgcctgcttgtggaggacaaggaagggtcgagtgtgtctggatctgttggtttctgttttgtgtgtttttgtgtatgtgtttagagctatgtgaaaatctaaaaaaaaaaaacaaaagcaaaggtaattctcataggtgctttataccctgactagagatagtttacacctgagatgtgagagaatgggttttaagaaaagtagtactctccaactatctgggggtaatttggtaataaaataaaataaacagtattaattggtctttggatccctgcaactgtagttaggaatctagtgtggctgaagaagccctgctaggcgctgattataaacgctgctcttatagggacgagcagcttctc

SEQ ID NO: 36136 - DNA, 1221 bp, Mus musculus
cagttcagttgtggcaggataacaacaatccagttcgaaatgttgcacaatccagcagaaaataccaggcctccaccaaataggcatgagtgagtggagaaactaggactagccatagtgctaggtcttctctgccatgcccctgttaatgaagtgaagatcagcaaatatcgtagatcaactgagcattgcttatatacctatgtcatcaaagtcccatagagatctacttatactctctccaaacatcacgttcttctcatgggttttgcctcagcaaaacaccatgtatgtctgcttcagcaaaatattatgtgaatcttcatcacataacacagtcagaattttccacttcatatcccccttttaaaaaaaaatcttttcccctaacattaacaacctacataaaataagaactataaactagaactttacatatttttttaaaagatttatcttcttttttttttttaaagatttatttatatattatatgtaagtacactttaactgtcttcagacactccagaagagggagtcagatctcgttacagatggttgcaagccaccatgtggttgctgggatttgaactcctgaccttcggaagagcagtcgggtgctcttatccactgagccatctcaccagccccgaactttacatattttaaatcaacagcttatgtacaatatagtcaaataaaaccatatatttctattaatatacagtaatttaaacaaaacaatcttaaattcctatcagtatcaaactaaaaaatcttaaatttctcttatgatacaataaatgcaaaacaaccttaaattccatcagtgtacaaaaattcaaacaaaacaaccttaaattcctatcaatatacaataattcaaataaaacaaacttatattatctataaattcacaataaaacagaacaaccttaaatttctatcaatatgcaataatttaaaactaccaccttagatgctaacaaccataacataccaaaaaaataataataataacaacaacaacaaaaaatccatcccaatttaagggattagaacaatagtcttttttataattgctgaattgggaagaattcctttttgggcccaaaggaaaaaatggtccaaatgcacaaaacaaagattattaaatgcagtaagtgattgggtctttctataattgctgttcctgtgggattgtgtggtatatcagtaaca

SEQ ID NO: 36137 - DNA, 1174 bp, Mus musculus
atggaaagaccccctgactaatgaatggaagggtccagatccagttctaatttggggtaggggctcagtttgtgttttttcacgagatgaagatggagccggtgtctgccagagagattaattcgtcagatgaacacagattctgactcttctggtaagtatcattctaaagactaaaattccttttgtgcttagaattcacctgagagcgaaagctcccaaagctgttctccagctactctctgagccagctcccgacaggaggccggagactagcctcagctttacaatttgcatttgaataaagtacctagacttccctgaaagaagttctgctttcctactttctcactgtccagattttgtctttcaagcaggtaaatcaacattctcgaagaggaccagcggatgtgcatccccgcccccctagagcacacaggtggctgctgttatctcctttccaaggacacttccagcacgtggctttcagtctgagttaaaaattaggtttaccaagagggctagaagagtagatatttctatattaataaagattggtttttattttgatagacaggcttagcccctcagctgacctctggcttttcacccttgctgttactgcaaggtgtccttagctcaataaggctatggaaaaaacagggatgaggaggaacgacttccagctcctattttagccacaaatcgtggtgttactaacgacataattcttgcttaggctttcctaattctgaggttgataattctcctttaggagctgcacagcactcagaactgtgcatactggtttgtgattgtacaaattcagtatgggcatcgcttggtgcagaggcactgcaggggaaggtccagcttgaccatttctgagtttcctgtgagataaacccggtttgaaagaggttggtaccaaattttggctaaaaatgaaaaatatttttcggctctgcctcacctccccaaaaggtacccagaggcacaggtgtgggtcttaccagtacccacgagaggaattgggtcaatgtccacccaagccaaggttaaaagcccactcatctacggatgagaaaatcatttgatcacctcagttaagcgttgccttatttaacttaattaataggggggagagagattggagacgtactattgaaagggc

SEQ ID NO: 36138 - DNA, 1126 bp, Mus musculus
tgctgcatattgctttttataaaatttagttatgtttcttgaattcctaatccttccaagacttttatcatgaagggttttggattttgtagaatgctttctcagcatctagtgagatgatcatttgttttttgtctttgtgttgtttatatagtgaattacattgatggatttctgtatattgaaccatccttgcatccctgggatgaagcctacttgatcctgatggatgattgtcttgatgtattcttggatttggtttgcaagaattttattgagtatttttgtatcgatattcataagggaaattggtttgaagttctctttctttgttggatcttcttgtggtttggttaacagagtaattgtggcttcatagaatgaattgggtaaagtaccttctgtttgtattttgtgaaatagtttgatgagaattggaattaagtcttctttgagggtatgatagatctttgcaataaacccatctggtcctgggctttttttttttttttttttggttggaagactgttaatgactgcttctttttctttaagggatttggggctgtttagattgttaatctgatcctgatttaactttggtacctggtatctgtctagaaatttgcccatttcatccaggttttccagctttgtttagtatagccttttttaataggatctgaagatgctttggatttcctcaggttctgttgttatatctcccttttcatttctgattttattaattaggatactgtccctgtgccctctagttagtctggctaaggatttttctatgttgttgattttatcaaaaagcagttcctggtttggttgattctttgtatagttatttttgtttcacttggtttatttcagccttgagtttgattgtttcctgttgtcctgggtgaatttgtttccttttgttctagagctttcagatgttatatcaaattgctagtttatgtttgcgccagcttctttttggaggcattcagagttatgagttttcctcttaggatggctttctttgtatcccatatgtttgggtatgatgtctctacattttcattaaactgtaaaaatctttaatttctttctttatttcttccttgaccaa

SEQ ID NO: 36139 - DNA, 1193 bp, Mus musculus
tgtttgtgtggaccccagatcaccaaaaagcctttaaagagattaaaaaggccctactgatggccagcctatgcctgacctaaccaagcctttcactctttatgtaaaagagagagcaggggtcaccagaagagtccttactcagactttgggactttgaaaaaggccagtgacttacctatccaagaagttacaccctgttgccagcgggtggttttcttgcctgaaagctattgctgccataatctgcttgtcaaggatgctgataagctcactctgggacagcaaataactgtagtggcatcccacactcttgaaagcattaccaacgctcctgtgacacatcagagctttttgttgtctaaatgagtgatcttcgcttcattccacctgctgtcccactgcgtgagactgcacctactcatcactgtgctgacattctggcagaagaaatgatctgaaggatcagatcagccttggtctgaggacagtagcctcgaggttaaaggtaagcagaaggcggggacagcagtatggtggtgaacagaaagcaagtgatctaagccagcagccttcctgagggacgtcggcccagaaagctgaacttgtgactttaagacaagctctataaatggcaaagaaaagtctacactgacaacaggtatgcttttgccactgtacggggcaatatacaaagagggctgttgacatctgcagaaaaagacctaagatgctgtggctaaaaaaattcaggtgacagatctaaccgccaatcaggtggcccaaggagcagtgatcctggcagtcaaggagcctaaagattattatgacatcagagagaccagctttagatacgtcgctgagcactatcaagttatggacagtatttgacttggcctgggggccaagaaattcaaaggtgtggttaggtcctttgactactatgttacaggactctctgacttggcagaagaaatagtcaaaagcttcaaggcctgtgctataatgaggtagaatttctaaaagaaatcttcccaaggtaatggacttgcctttgttgcccaggtaaatcagagactggccaagatattagagatcagttaaaagttacattgtgcatgcaggccccaaagctcaggacaggtaaaaaaattaatagaaccattaagggacccttaccaaattgacagcgg

SEQ ID NO: 36140 - DNA, 1231 bp, Mus musculus
tatgtggatagatctctccaaatgggcaaaggatgtgaagatatttgtgtcccatgtaaatgctcaccaaaaggtgacttcagctgaggaggagttcaataatcaagtggataagatgacccgttctgtggacaatcagcctctctccccagccatccctgtcattgctcaatgggcacatgaacaaagtggccatggtggtcgagatggaggtaattcacacacagcctttctgtctcttctctcccttacccagccaggtgagaacaagaccagtaccacaattattgagacaaatctgaagcaaggtttattaaacactggccagacccacacccaggattcccagagagctgtggagaattacattaatccagcgctcatataggcaaactttcccaccttcgtccaatcagggacaagcgtacatcctgatgtaccgccagcctagcacccccacctgtgtgcgatcaagcacatccggttttagcagagcagggaagctccggagaggtgggctgagaagcggaggctgctgaacagactttggagccatgaatatatttgatcggaagatcaactttgatgccctcttaaaattttcccacataactccctcgacacagcagcacctaaagaaggtatttactaatgcgtttgcgattgtacgagggatagttatatcatgttaggcgtatttacaaccttgttattgtttcatgtgaacatgagatattatttgtgtcaagttgacaaggggtggattgtagtggctattcctggttgtcaacttgacaatatttggaatgaactacaatccggaattggaaggctcaccagtgacccttatctggaggcttggagatccttatctggatcttggtttgaagatcttgagccatattggctatggattccagaagattgaatctccgagtttaaggaacacacctttaatctgggctacgcctttcatctgggattaaaggtgtggtggaacacacctttaatctgggctacaccttctgctggagacaatataaggacattggaagaagggagtctagctcttgctcctgctccttcgcctgcttgctgcgtgagactgagtaactgctagatccttggacttccattcacagctgtgactgaacgattgttgggaattgagctgccgactgtaagtcatcaataaattcctttattatctagagactatccataagttctg

SEQ ID NO: 36141 - DNA, 1235 bp, Mus musculus
tgtgagtatattaaattctgatattagaagaatttgtctacaaatcaaatatgtactattgaatttaaaagcttatatttttgagctcagactaccatagtaattcttgttggaagttataagctaagattttttttaatatgaacttacctatctacaaaaaatgttaaatcatattactgttttaaggaaatgaaggtatgtaacttaacttcattttcttaccaaaatatagctgaagtacaaagccattttttgcattagaatgaaaggtgtagaaagctcaagtctgtatgttaccaatgctgatactcagtataaatgctttcactgtataagtactttaagtggtgtataatgaatggagaaaagatatattaatttaatggccaactacatatttaaatgctttcatgtccaccaaatctttttcttttttcaccatatctttgagtaaaatttgactcagtttatttgggattactgattgtttttttctttcttttttttttttgagatgtgagaagcaattatctaaaccaacttaagtttcctcaaagagttacacaacatttaataatacagttgaaataattttaaagaaatacttgtaatatgaacgctgagatcagaaccagggactcatgtatttaagggagtcacctgttgtgtgaattgagggaattggtttggatggcatttcatttttcttcccagctctaaaatattgtggtttctataatctctctgtaagcaaccatgtactcaaataatttctgtaatcccaagtaagctgcttaaaactgctttcttcaaagtacacgtgttaaaaaaaaaaagcacccattatttcaatcaataaaataaagactatgttctcttagggggtaaacaaacataaactgtaataatgtctggaatgctttcatattcttaaggttatttaaaaggatggtggtaacatggcagtgtacattcattgtcatcatagctaacatgtgtgtttgcttattgtgacctgatgatattgcatgtgcttcctaacagacacctgaataaaactgagttgtctccagttttatgaatattactaatgtttgatgtcaaatatttggtggtttttaaatcagatggtccattgacaagcagctaaagtccttgactcacttggtatgaaagagcaagctcattgttagagattgtacatggtatcaatagtttaaagaaaatacctg

SEQ ID NO: 36142 - DNA, 1148 bp, Mus musculus
tcttcctttacaaaaattccaagactgtagatttttccaatctttttttttgtttctatgagccaaatattttgatggaagacaactgactgacaggcatgttttgaagctttctcaccttggagaaacagtaattagtactgtgttctatcattaaaactatgaaaattgtttacttaatttccttttaaagataagagggctgccattcactgagcaacaatattcaatacgaagcaatgcttttaccttttcatcatgacagtcaattttgcaccaattatcactgaatgtgtggctgttggcccgtgtggagcttaggtttctgccctgctatctgacttacattaggtgttaaatatgctttgtctgccctatacatttttactttttcattatgtattgatatactcattaaaggtgtttcctcatttaatgcaaataggatggtacctgtcacattataaaaaggttttgtctttataaaaagccagtgttcccatctgaaaagtaaaaccagtgttaaagtggaaaaatgttccgtgccacatgtaagatataggaggattatagctaaattttagtgtaaagctatgttttcccctctaactaactgctcttgttcttttatatgggatttaaacaatgaaaaagtgagctgtgagaaagagtcatcttgctaggaaagggcattaagagatgatgatgcaacacacagctatgtgtcagaacctgtttctaaaacaagcaagtctgactttgcatcattaattatgttacaattagtgttggtcaggaggatattaaggaaaccacaagttgatgttgtaaaactattgtttgattctccacacatacttagtataatgtccaataatagacagctatatgagtattaaaggaatagcagattgagtaactccatgttgagtgaacttttaatatgtatgtggagagcctagtctgtgtttattgctctgaaaggcaaatgcttgtcattgtaggaggggtgagggtagacctgacctatgggagctggcatgcatagattatttagtttcaaataacaaagaagattttatagtttcaaggtgcaatgaagaaatgaacagcttttgtgagtattgttaaagctgtcctactaaatt

SEQ ID NO: 36143 - DNA, 1128 bp, Mus musculus
gaaaaagttactcacctcacattaggcagccacatttcctcatccttatgataatatgcagaaagcagtttacttctaattttatgataattttaacgagtacttttgaaattgagattttagaacatgactgattacaattttcacaacatgtgaggcattgagcagtttcagaaaaatctcaatactatagaataaagtggttatatcgactatatctacaggtttgtagacttaataaatataggaagtagttgaaagttgtagtacacatgtcaatatatatgcatttatagtgactgttgttggtttttttttaaaccattattagataatttttcatcaggtccttttcatccatgggatggatgtggtaaaagatgtgaccaaattattttctccatgcttctcttgactaatgaatctcatgtatttctgtatgtgctttagctaaatgaaatctttttcaatccaaataaatcattaaaaggtcttcaatggtccacattttagttgtttcatggactatgaacctgtcttaattgttaacacagactctcattctttttttttggtcccatatctatgataaagaaacaagggacaaatataaccgctgtcttctttggtgggaggaaataatttatgtcaatagcgtatctttcatttcagaggactgttgtagtaccaaagaagacttttattcatctaaataattgctgcttataaacagggtgttaattttttttaaagaatttgcttctcttttttgaagagtctgaaatcatttggattgctaaatcatttctctttttggattcttatgaaatcatttacttggaagctgccattatatttttgtatcttgtgatatctcactaagccaggatacttaatgggctttcagttaaaattgatgtttgttttaaaacactagctgaaaaatttaacacatcttgatgataattactgttatcaaatgaatattattcaatggtggattagttgttttttgtacactgctcaatatttgatcagataactgatttgacttatctttagattttaacatagattatgtttatgttgagtttcctgttgtttccttaaacagaatactgcctcaga

SEQ ID NO: 36144 - DNA, 1197 bp, Mus musculus
ttctttaacattttagaagaaatcttttacatgcctccttttgccaatcaatatagcttctgctctcaagaaactaggtctaaaggggatgaagacagatgacaacagagaggtatatagaacagagagaggaccaaaagaggctatattgtcagcgttgcaaagtgagagaccagcaactgtgtgtggtttctacagtgttttgaatggtaatgttttttcataagtgctaagtctagatccagagtacatcttgtttcatggtcattttctgatctttcatctgtttctcacatttgagctgtcagcttctgctacaaagaagagtaaacttaaggaatcccttctacaggaaataaggaaggtttaatttagaggtaggtgggatgctttatggaattttttttgtttatattctattttgcagcttaagagagagatgaacaaacaatgtataaaatcaccccagttatacaacagctacagaagggcttattgtgtcatgggcacattaatcttcaaatggtgggaggaatatttttacggataaaataagcaggtagaaatttcgtagaggtgctgtagacagtcgaattttcaaataactaatttatgtattgtggttacttagagattgtagcattagttaaaaaaatgagggctggaagagccagtgaaattggaaacatggaatatataatgaagtaggtctgcctggccttttcccttttgtttctgtaacgctgattgcaagctgaaataatagcatttgagattctgctgctgatttctttttttttccccccacgatcagtactgcttttcaattttcatatttacaagctttactttacaaagcaaatctgaaagctgcctgttattgggcatagctacaacttcatccccaggttatatggattctggctttgtgacttttctgctggtatttactgcacagcttttgtgtaaagcctttcttaattctgataccctaaaccaccttctattttcaccttactaggattcctgtagctctttctcttacatatgtatttctttcctatttggtaatttctgtgaccaaattcctaagagctttttaaaaaatgtcattccaagtttacattatagtaatttcaacacttgaacagtaacctctatcattgtttggttctatctttctgtgtccacaggaca

SEQ ID NO: 36145 - DNA, 1191 bp, Mus musculus
tatacctatttttaatttattttatttctatacttttttgttaaaaactaaaatacaagcagcattatactgggcctagtcaaggtcaatttaatataaccacctaccactgtgacatattgttccagtagaaggctgtcaaggtctttaacatgtataacattcattgtcttcactgttaacagtgccttcttctagaattcttcatgaaaatcccacattactttgttttacagttaaattttgtttaataaatagtttcagtataataacaataaaactatagtacagcagttttataaactagcaacagtcatttatagctagttattttgtatccttgtgcttgctattttttcatgcaaataggatataggaggtttttttaatatcaagattgccacaatcattaataataagttttattctgatgtacataggtgataaattttctagtccattatagtcttcctgggaccaccagtgcttatatagtgtgtccttactagatctgttagacaatatcggaccatgcatgaaaattttaatattttttcttggatgtgggttaattacatggtgtgtgtgtgtagcttatgttcctctgtgtgtacattatatctgtgtatatgtgtgcatgcatgtacatgtatgtttgtgtatatgagagactcagtcttgctatatagaccagttttccctatctttttgggaaccagattgggtaatgtgtgtgtgtgtgtgtgtgtgtgtgtgtgtgtgtgtgtgtgtgtgtgaattttataacaacatacaattgttttgccctgcctgccatatgttaaaatgccatggcaaatactactacagttaatcaagttgcgatgaccttagtgtatatcaaatacagatgtaatgtaactcagtcataagtgatatatagaattatttttggatgagggactagtgagtgatgcacataaatatgaatattaatattgaaaatttatatgtgtatgtgtgagtgactgagagagagagatagatagagggaggcaggtggtgagatggacaggggagttggagaggtgagatggagaggaagagaaagagggagagggtgtgatgagtatgaaaccaagagcctctcacttgctaggcaaatactctatcactgagattcattttgtctccaaatcaatgctgaagtta

SEQ ID NO: 36146 - DNA, 1117 bp, Mus musculus
gttttatggatctctgtaatgaaaccttaaatgttacttgggctctcataccttattgtctgttctaggctatataggatattaatgaagacctttccttttctcctgagcacagaaagaaagctcaggtcacctccatgctacatgacttagttgtgctacaaatgaagagatgtggaagtcagatgtgtagcccaatttcacaaacttatacttttaaacactactggtgttctctgtggtatacctgtatatgttaaagctctattatcagaaatctcaactggggagtcatagtctccttatctgtctcacataacaaaacagtatgctttgaattcttgtgtattgacgtgtcttcttcttgcataccctatatagctaatgtaagaatttagtgtatatagcttttctaaaaattttagttattttagatattgtaatataattacagtatttttccctctttgttcctccaatccctcccatatacctcttctgctatctttgaagtttatgctaccttttctttaattgaaggtattgatctctctctctctctctctctctctctctctctctgtatatttgtgtgtgtgtatgtatttggatgcactctaaatgcacaaatacaacccctcagtctgtgtatgttacatgaatatatatttgttctgggctgaccatttgctattagataacaagctgtggggccctttgggggagaccataatttctctctagttgtctgtagttctttacatagctgactgaaccaattcatccactaaattctttacagtgtgtggaaatatgtgtctcaatatataatactattccaaaagaaaaaaaaagaaaaaaaatgttgctacctacccttggttaagttttccatgcaaaagttatctttgcttttcttatcatagcaaaattaatactattatgatttatctctgcataccaacatcatttcctaatactgtttccatctattggcatgagtttaacttcgataatttctaatttaagttacttttatatgagcctcaacaaaatatgtgatgcattcaaatggcagacttaactattatgaattatcaatatctcctccattaga

SEQ ID NO: 36147 - DNA, 1152 bp, Mus musculus
ttctctctttgctttaccctgcttttcggcatctaggtattgcttttttgtaaatattgtttatgttatattattttcaaatatccataatagttaattcttttcaggaaaagcttattatctcaagatatgtattcttgaccatactttcagaaacagaacttcaaggaagaacttttacattaaaatttgatgtccaacttattttattattattttatagctttttggatatttgaataaagaaagtattctaccttgttttttcttgttaaacttaactgaatattaatactcattttaaaatgatgttaaaatagccatcaagtggacaattagcatagttattgtatcttttttttataaaaaaaaacccttgtatttatttttattttctagtgtatctcacttagttcatattcttaagtaacaaaatgatgctttaaataggagaagctgaaaacagcataaatatggtatatgtagatatttgtattatgaatggacaactaattatgaattcatgtgtacgtctatgttacttatggtttattagatcatggcattatggaccttgagtaaaagctgcctacctgcactaacagaaactctgcttgtcatgcagcatggcttcacattagaacattttgtcactgtaaaatctaccacttataatggatttacaagggaaagtcaaatgctaaaataggtttcctacaaaagatggaaattaaaaaaaaaacaacaaattcaccgttactaaatatatatatatatatatatatatatatatatatatatatcaatgaatgcttgctatattgtagatatatcttaatcatccatacaaatgctggagtccagttgctgctaaggacttgtttttaaactttgttaaactataatttcaacttctatctcagaaatattagaaactagagtagtggcttagtacatactggaaatattttgttcttgtggaggacctgagctttgtttccagcatatcatttgggtggctcatacctgcctacaactccaaattcaggggaatcaaaagcctctgcactctacgaatctactgttttgtgtacacctagtcacccactcagtgcccccacatacatctcatatgtgcacacacccatacat

SEQ ID NO: 36148 - DNA, 1204 bp, Mus musculus
aataaatttaaataggaatgggttcgtctgaactaatggctgagtaaaatgatgacatttctatattaaatatgatgatttggtatattacattacacattttcatttacctcatagagagtagaatttttatgagcagtaactcagaaatgtgtgaaatgagttcgtggagccattctctccatttaggaaaatcccttagcagatactggttttagttgttttgtggaatacctagtaaaagattctaaattttctgtacctttttctttagtttcagctcaaatactcaagagcaaccttgtagcaatggaacaaagcattcttcatctggagaaaaacatcaagaatttcccaccagcagaatcgcaccatgataagtttgtggaaaagatgatgatatcctttatataatcaagcatttgtttctgtgtttgcatgtgtctatccatctttttactttgtggttagttctagactcactattctgtaacattagatgaatctgcgtgtatgctgcttttgtttttttattagcagattaaattttatttcacagtgttttgaatttggtagaagcaagagaacaactggatcaaaaaattaccagttttcaaggacagatttgattttgtttggaaaaccacaagatatacaaggtaaatcttaggtggtttaattatatctgaaagaacaaagcaaataatcttctttagtaatcaagcgcttaaaagataggatcattgtgaaaaaaatgaccttttaaagggggttataattatttctctcttctatggacatattcacatgcattgtctgagggtatccatgcattttgggtgactaatattagtagactgaaagataaatggatagatacatggatgcgaagagaaatgaattgatcagtatttgatggatttaaatcagctgaaatacatgaatagagataacagtaaatatatcttgatatatacatatgtatgtcttgatatatacatatgtatgtgtatatatgtatatatatacatacatatacatatatatatatgaaaaaggaaactgtgagaaactatatttagtttgaattgttgaatggtaaagctggtgtcttaagataaactacattcagagctgattttctttttctattctgtattttcagtaagagccatattttcctcctctgggtttaaataagtaa

SEQ ID NO: 36149 - DNA, 1146 bp, Mus musculus
ataatttaaaattaaaggccgaaactttttcatatttaaaaatttcatatgccagcaagattttgctgaaaggaccctgatatagctgtctcctgtgaggctatgccagtgcctggcaaatacagaagtggatgctcacagtcagctattggatggatcacagggctcccaatggaggacctagagaaagcatccaaggagctgaagctgtatgcaaccctataggtggaacaacaatatgaactaaccagtacacccagagctcctgtctctagctgcatatgtgtcagaagatggcctagtcggccatcactgggaagagaccccttggtctcgcaaactttatatgcggaaatacaggggagggccagggccaagaagtggcagtggatgggtaggggagcagggcaagggggagggtacagggaactttcgggatagcatttgaaatgtaaataaagaaactaataaaaaaaaaagaaaaaactacaaaatggatagaaagtacaagttaattatagcttacgcatctatggcatgttggacaaataaaccttaccatagccagtggggtggcctttgactgaatttactcaaataagttgaaatattgtgagatttgttgacaggaaggaagagtggattgatttggccaaagggaggaagagaattaagctgagtatgccattctatgagtgatatagctaagaatgagaatttgatttctttcttttttgttagatattttctttatttacatttcaaatgctattccaaaagtcccctataccctccccctgccctgctccccaacctacccacttccacttcctggccctggcattccccgagaatttgagtcttatttgggatttagtatgaattcaagacatgttattcctgagaagttatcatctatggtgattttctttagaaaatacaaaatagaaactaaatggactcttaattttgatctctgacctggttccctcttctctctctctctctctctctctctctctctctctctctctctctagcatcttaaataacccatactaacctctttcctcctgtcttgacttagccactttgtagctctcatcatcttctttatcttattctctttgtaccatgtcttttgat

SEQ ID NO: 36150 - DNA, 1686 bp, Mus musculus
acaggaagaatttctattgtctagtttcagctcatcttatgtatatagtgtaaagtctaggagaataggcgcattaatgattgtaaaggagcaaatatcacactcagaaagagaagcccaactcaaggtatttagaacccatctcaagtgaaagctaatggattcttccatgtggcagaaattaaccttaccattactctaatgttgcagtacagggtcacgggcacttagcattgctaaaataaaccaaagtttaacagaatccactagatttcactcttatttaaaatgtatttaagaagtctccacagacttatagaaattttttatataactatttttgagaaaagtgtagactttttcatgtatatgctagggatgagcctgaaattctcttgcctttatttagattttagaggaaaatattgatttctacttcttccattacttcattctcccttcacccccttagaggtagggaacagaactgcagaagagtgtagagggggaaagtgacattttaatgcaggaggcagtaggaaacttttgaaagttcaattggttggtctctagttctaccccttttcccactccactctggtagtgaaaaagcaattctctctccctcctgccctcccttttaccctccctctcttccttcctccctccttccctacttcactctcttcctctccctccctccattccttcctttccctccctcccctgtccctccttccctccctacctttccctatgtccctccccagcatgtgtatatgtatgtgtgtgtgtgtgtgtgtgtgtgtgtgtgtgtgtgtgtgtgtgtttgtgtgtgtgtgtgtgtatctcttactgaaataacccatacccaactctctgtcatcatcatacttacttaccttatattattaacgcatttcagtgatactgccaaaacaacgctaacaggtaaagaagctcggcattgttttaaatatgtgagagagcagaagttatacttaacttgtctattctcctacaatgtgcatttgtaataattggtgtgacttctctggagtgtaatttcaagactaattcatgcagatgattgtgattgctgtaaaagattgcttgtatgtatatttcttatgtagataattctatttctattctgccaaagcacattatagacatttagagaaaagaacaaataactggcttgacaagccaccttctgagacaaagtaaacaagtgtccagtagctcatcgactctttctacagatataaagtaatttacatggttgcctttcactcgttcttacttaggtatgatacttcaaaatactctgaagctactataagtagaaaaatcagaacgtaacaatgtctgagttttttcctttttttcttatgtgaacacacacacactttagaacataccactttcacacacttttaaaacaataaccatgaagtttaggttctactaattaatgtaaataactactgtatgcattttcaattttacaaagtattttctgaaatattgtggtatggcttatttgaggttttttgtttttgtttttatagcttttcgggctgtaaaaaaaaattaatcttgaaatgtaaacgttgactgaaatttagggcatttgccctgccatattttctaactggtcaaggttgaaatactgaggtatgt

SEQ ID NO: 36151 - DNA, 3170 bp, Mus musculus
atatttgtatttaaatgcattccacatgcttttcacaaatattagaaaacctttcaggggacagacacagaattaactcatgtgacttataatggtcctgttctggtcacttgcattttttgttttcggtcgaaaggtatcatctgaaaacaaaagtacatagtggcatttttttaaaagaaaaccaaattaggctgaagtattttatgtatttttgtttatatctgccacacatgaaaaatgccctttctacagctttttcttcagcatattacaaaacaagttaactgtttagaatattttcctttggctactgtaatgattgaccatcaatcttgtagtttaagaccacaacaatttattgtcccatggtcctggaggccagaagtttgacatctggacatcagaccattcatgctacctccagaggctacaacagaggccccttctgtgatttgtccattttttgatggccaacggtattgtgtggcttatggccacatttttctctactcctttttatatcatcttctctgtgcacctgatctctctcagcctgtcctgtaaagatgttgatggtggcatttagagaccgccatctgaagacaggataatcctctcaccacacacgctgaactttatgatatctctatgacccttctttcatgcaagctaacatctaggttctttcctagatagcttagcactgtacttgagatagttgaatgaatccagaaatgtgtgcctgatcttttcaccactattcaaaagctggcaggccgcatccttttggtgcacgcctttaatcccagcacttgggaggctgaggcaggcggatttctgagttcgaggccagcctggtctacaaagagagttccaggacagccagggctacagagaaaccctgtctcaaaacaaaacaaaacaaaaacaaacaaacaaacaaacaaaacaacaacaaaatttatcttcacacagaatttcctcattttatcatctttcactattaacaaaatttaccaaatcaagtgctaattccttcttgatataatggttctttcttcacttcctcctatcgggctcttttaaaaaacttagtacaaaaataatgagtttcattgtggcatttttcatgccttgttgttgtcattgatgatgatgatgatggtgatggtgatggtgatgatgatgatggtccttctccccaccttatgtgccctcgcctctaccactacccactgctatggtccccctagtatatcccatttcactggcatgtctcatatgttctagtatcgtctcttctcctccccattctcctaagacttcttttccccagcaaaaatgaacgagctatacctacaacagggcctgccaagttcctcaactttgtcccttacaaggtcaagattagctttccataaaactgtaggagacaattcagataagttgtttggtttggttttgctgctatataacaacaatctttcttgcagttcccactacagtattcatttcctcttgtgccctcaccagaaatgcctttaacatccacatttccatcaggggtttggctcaggcaatctatagtgtctctattaagtttactatcaacaattgtaccatcctctacccagcatcaaattccaaagccactttcacatctgtaggtatttgtcatagcagtaccccacctcatactaaaatttatatcacattcctatggttactgtaacatattcccacagacacagagggataaaatagtagatttctggttctgtggtgtttttatagccacaactccaaaaccatgatattggcaagagagcactcctctgcaaactctagagaaaaatccactccttgcatcttctcatgtgattgtcattattccttggattgtggcttcatcttactactctgttgttttgacagcttcccctctgtatatataatctacctctacttctctcttatgaagataattttgatgacccgtccggattatctattataacatcctgattttcagagcctaaatttaattacaacttcacatacctgctgaacagaataaggtaatatcacagattctgaggattagcacacaaatgaacatgtctttttgggagggaggagcataattcagccactacagtagtcattgcatataaatgtactttatactttttaaaatgcatccttggtgctcaagccagatttaaggttgttattaaaagctattgtctgcacaggctactgcatgctttgttactaaatagacaaaatggctattctaaattttggttgatattttcaccactgtaaccaattagctgaaacaattcacggatctcaactctgctctagtgtgtctcttctgcccttttttatgaagcctttgttcaaatgtcttctatcatgcataatgtaggcacaaaactacctctgatacagaagggttctttacaagcttcctttagatattgtgaatccctcagctgaagtgagaggtaaaagcaaagactgtattgaatgggtattgagggagattttgtccatagcaagcaactatttctttaataaatagttccagtagcagtaaagctgtcaatttgtgctgtcatttcacctcggaataaacacctgtatttgcgctggaccaataatgacttgcattctctgtataatgcctattaattcaataaagcttagatctgcattaaatcttcagtctctgattccgactaaatatgaatgaaaaggcatgggtgctgaagtgtcaaaaggattgaagacattctaggaaaagcttcagctaaacagagcttcaagagtggttttggaagggccaggtcaagtggagatcatgggctgtcttcaaagacttaagagaactctaaggtttttcttagcattcctgcacacttctcatcaaaatagtagataaatgcttatacaactaaaaagtggagatttatatgctacatgctcaacacaaacagtttttgcagagatttgtgtctgtgtgtgtgtgtgtgtgtgtgtgtctgtgtgtgtgtctgtgtgtgcattatatacagtgctaaagcaaatgggcttcagatgctcagagtggtaaatgtccagaacaagtaaggaagagtggcaggcttttattctctgga

SEQ ID NO: 36152 - DNA, 1160 bp, Mus musculus
tggaaagttttcttttccctacgcagactagtaaatgaaactgttcagattgaaacttagagttccgttgatcctctgaagccagtagaaaaagtgaaggtttatcttggtactgaatagatagtgggctttggaattcagtacttcctgcagaacagtggttctcaaaatactgtctcagagcaacatcacttaggaacttgttagaaatgataattctctatccctgcctagaatgactgtataagaaatactaaggaactggcccagaaacccatataaatcagaggcccattcaagtttgagggcttgtaaaagcacaggtttgtagagcctaatccttagagtttattattcagttgttttgtggtaggaactcttttcctatctacagatgcctaggagatactgaggagacaatgctccagaggaaacttgcctcataggactaactgcatctaaagtggccatttatacagatttgttgatgtggtgaccacctgatcactaatgaaagatgtagttctgaactctgaaactggaaagtacccagagtaccttccagatgctgtcatctcagcatatggctggtagaggggaattcagatgacttttcctctacatctcccatttcactcaaaaggaaacacaaatggttcacttgacgtggcaaagacaaggagcagtttggggagaggcagggatggaaggaatagcttttttgggcattcaaggtggagaaaggattattactgtatataatccattttatggggatcattttgatgtcaaatgttcccccaagacactctcagcaagtctggtccacttggctcttttcacagggtaataaaacccttctgactttgacaaactggcataaatgagctgaagaagtccattgtatacagtcctagtgtttgccttcttggtaaaattacattttaaggatgtcatttcatgagtcaaattgtatctgctgacactaaagtgtattgagatgttgttctttagtttaagtatgtatcaaagtaatattcaaaggggatgttatgggggtgggactgggactgggtggctttatattgatattgaaatattccagagcaaaacacattgtcctaatgaagttgttacagctctctttgttttcttgtgaa

SEQ ID NO: 36153 - DNA, 1149 bp, Mus musculus
tctctcttttgtaattcaagaatacttaaaaagaaaggctagaagttagagcgctagaattcaaaagagaatttattttcttaagtttagtagatacagtcagctttttgaaatgttttcattatttttatctgagttcctagctttatacattactaggaatactttcttttgtgggaggtgggagggtcttaagggagggggtgggtaaggcactggggatggggttaggtaagggagaagatttctggaaaaaaaagacacctataatgaagctacaaatccatcctcatttcctattctgtactgaatactacctcatgcaaaatattggcatggctgcaaatttccccctgacactgacagagatcagttgtccttccatcttcttcttgccttagttaattttctctcatatattttctcctattctgatttactttattttagtgtagtagattatgaattagctatttatttttgttcttccagatgactatttaatgaacacgttcagctttttacaagtgtcctttaagttaggaagactgcctatagaatttccactgctcttcaccatgatccatctgatagtatcttgttagctagcgcctcaaggtcactttgtagtcagactgtacagttttctacaggtgtatttcttactagagagtttgaaagattgtggaagatggaaatggaaggttggaatgtagagcagccactgcctgcaatagtcttaccagccacttaaaaacagtagcggtggcattgattttttttgccttttacctttttttaaaaaagcaactaaatttcttaaattttatccccagaatttactttcaagctttagattcatccttttaccctatctaaaacattgttctcagtgggcagtcagatgttttttttctgtttctaaactattatgttcagagaatttttctcattaaggaaattccccctgccccctccaaccctccaattgtctgatggaagtacaagtgcatcctaggagggcgggttctaagggcaggctgtgcttgcaaatcggacttttgcacaagggtcttaaatttcccaccaaattgggattcttcccctccccttttaatacatgtgatgaaaggctacctaggccaatgg

SEQ ID NO: 36154 - DNA, 1623 bp, Mus musculus
tgttaatgtttcccctagaccttaatggtcattcatacagccttagtgcctaatagtgttgctttctaggtaaaaagttaatttttttgtagactaagatttcaatgagttaaagttaacctggcctaaataaaaaaccagatgtgggggaccattgttactggctgaattaatctccagggtacctggaatatttgaactggggcatgacctgggagcattgggggggtggggggggggctgcactagcaggaatagaccagaatgcagacaaatgccgatgatgaaattagacaacaactaaattaactatgttttctttaatttttggacaccaaggttacctttgtgagttataacagcgcctggatggagactgacatctgcttagcctgaaaagctacaccagtaggctgattcaatcaagatacttgtgtattgtattctgtgtccactttctgtcctattcttacacccctgtatctctgaaacactggaagtgctagtaaattgtaaatgaaataataccctgtttcccttggatttgatttctcagtgtaggaattgtgagaagtgctgtgaacttgccatttccctaacagtgtcactggtggaactttaacccctatgaatttgtcgttgatgtagtgtgatagaaaattggtctccttgagtgggccttgtactagtcaagattgtctggcttgattatataatatccaaaaaaaggaaaacatttccttagcctctgctggtaggcagagttgcattgtataatttcatcccagctggtcatcagatggtgcccatcaatggcgttcctgcatggtggtaccagtctcaggctttgggtgcaaaggacagagactaagagccaccacttgtattctgtgatacatcagctttcagcacacaatgtatgtgcttttatcaccaaactaaggcattcatacggattctactttattatttgaaaggttataattactttaatggcatcagaactcttgtattttccttatgaatttactggaacttacttgattaactttagctagctattcctcaccaagcaaatcatacttaataccaactgtcagcattttggttaattttaatagtattcattttgttttgtatccttgattaataaatataaatcctttacacaataaatactgcatttcctctaaaagaatcgttttaatttttagaaactactggaatggtggggttttttttccactgagaaagtgaaaccctacatttccacatggaatcccatttttagggatgaaaggtaaggccaaggccttgactctgttattaagtatccctgttgaaaatagcattctctatgataatatcatattccaagtcattaaatagcatgtgtttaccattttcttaaaaggtcaggcatttgtagtggtatagtttgcattgaaaagttgcataagagatcatatgacctgtatctttaggataatgaaataattcctttgactttgagtctatgcatccaatattaacccccccccctttttttatcacatagtccctgattttgtggtaagaagtcaaacacatcagtaaaatggacaaagcctacccagtttatga

SEQ ID NO: 36155 - DNA, 1133 bp, Mus musculus
taatgacgtctgcatccgaacctccccggatgaggcagatggcgccaggtggaggtcttacatcgccattgctccaaaggaaagcagtttattctgttgtcgtagtgtgtatattttctgtgacattaaataaactttgaacacaagtttaacatactacaaattgatatacataatccttttgcttttaagaagctaacagcaaggatgtaagcttaactgtgatttctaactgcagcatcattctttaatcttacattgccatagctctattcttactttagcataagcatttattcttcttaatgatacttgagaatttctcagaaacaatgttttcaggaactttgatttttgttgaatttgctttcagtaaagtaataacactttaccccgtgaaaactttctagagtctcagagctttctgggaggaaaacaaaaaagcacgtggttagaactaaaaatgatcagaaggccaacaagggaagagcgtaccacaacagtgtgtttgcttccagaaatgccagttatccaagtgtgttgtttggtcagtagcaggtgtgaacatacataggacaaaggctgtcgtggcactggtttgcaaaagattgtcgtaaagctctcctgtctaggtagcccgctttacaagtttaaaaaggcactggttttccacatggtcaaatttaataaagaaaaccaagtgaacaaaatatattccaatctttcagaaaatcacaaagctttcagccctgtcatcttaactaaatccattccaagaacttcaaacagaaaaccctaaaactttgacattttcaagtctttaaagaggaccaagtatagagcaccggacggcaaactgcccgttatggttgcctgcttctttccaagtccgaccaacttggaaggcaattagtgccattagcctgtgctaacctgcaggttgccttgccttttgttctcccacagtggcattaaggaggaacttggtttctctccaccagtttgacctcaagacatttgaagagttgccttaataattattaagtttactagcactaattgtaagcttatttgtattcccagatccctaccctctgcattaggattatgggcaggtgaattaaaatcactac

SEQ ID NO: 36156 - DNA, 1708 bp, Mus musculus
gatgttaattatgcatgcacttctttgtcattaccctctgtgcctcctgcagaagcagtccttgctgtgttggttttggcagctgtcttgacttaaaagcaccaatgtatttagatgcagagaccaagagcaaagtatttctagttaggaacttgggttttacacaaccagttccaaatcaagataagtgaagctgaagtgatttgggaaacagttgtctagtagaaaccatgtcctggaaagccagcacattttcccgaagcctcagtaaacttaatttgcttagcaggcattcaggtgactaagttgacaagagcagtggcatcccaattcatcactatggaaacactcatcagtggttggttggtttgtttgctgttattttttactgttgtaataatacagttagctaccccacgttcatgatctgcctttattatgttcaaaactaatgactgaaaaataatcccacaaatccttcaggctgtaagttcctagataattgaaaacaaaaatgtgttcacttttggttaattaatggtacaaattagatggtctagtgctaactctatagattcattctgctaaatgtatgaggtcaactgcctgagtacagtgaagtgtggagttttttctccctgaagagcctgcacctttttgtgtaattcaccataactaacatcccagagccagcgtgcttattgtcctggttgataggaaaaatcaacatttttgtaggaaaaagagtgacatttagtggatgattcctgattgagtaagacctggaaaatagccaaaattataacttttttctttttataatacattcattaacaaactcctttaacaacaacaaaaagcataaaagagcttcagttcaattatctcatgatgtacgtcaggcctttccagttattccaaacaatacaaagtgacaatatagttggcttctaactatagtacaaatttgattacagttaatatacttaagatattactaggaaattgttcaataagcaaaaaggaaagtcaattattttgacaaagtaacgtgtaaattgttggtcacactggattaactcatgtaacaatgtacttagtgggtgatatgggagtgggaagcttggtcgttctatgttgtttatttatgattgttgttctgtcgtggattcaataaatattttaaaagtcaccctacttagaaatcttttgtgagggacaagtgggagggaagattatcaagcaagacacctgatgttaaattgtgcaagtgtcagccagcaaaattcagctaaaggcaggttcccaggatttacagcccccccccccccaataaaaaccaattcatgtgttttgcacttgtgaattatgcagctctcaggtcggccaagcccatgtatgatcaaacttgaagttgggagggaaggccttgtgaggcaaagggttatctagtaactgacccccaagttagtgaagagcaaaggaaagtgtggaagctgtgctgcttcctccaagtcagaacgtttctttgttgaagtagaactgaaccttcctaggatccagactcgagtatcgctgacagcgtttgcgcaggctttttgccaaagtccgagggccacataagaaaacccccaccgcagacctgtaagagtagagcagtactaattacttggatgcaattgtgagctgaaaacagtggaaatgtaga

SEQ ID NO: 36157 - DNA, 1150 bp, Mus musculus
caaggtctcacatagtgcacactagccttgctctcacaatataactgaggttgacttcgaacttgtaagccttctgcctacactttgtgagtgttgggcttacaggcatgtgccaccacacatggctttatgcagtgatggggatcaaagccagggaaagatgcgtgtgagggaaacccgtttactaactgagctacagccctagccccttgcaaatatttttaggaagtagaaccacattgagctttttacaaagcagaataagaggctagggagatggctaactgggtaaagtgcttatcgcacatacacacaagaagctgaatttggatctagcacataataacaaggcatagtggtacctgcctgttcttgtgctgagacgtgtatgcagtgggatcctgagggctttcctggacagtcaatttagctaatagtggtttaatgagagaccctatctcaaaaaaagttgaaaaatgataagacacctgatagcgacatctgtcctccacaagtataatcacacacacatactacacacatgcaatgcagacaaagttatagaatgattacagggttgttgggctttctagaatttgacacttctagaatgtcctttcatgatggggttatctctggggctagagagatggctcagtgttcacaagcatataatgctcttgcagaggccctgagtttgattgttagtatccatgtcaagttgctcattactgcctatgactctagttccagggtatctgatacccttggctggtctccatggacatggtacttatattcacacacatgcaaatacacatagtttaaaaataacttttaaaaagcttaaagagaaaatgtggttatctctagggacaataatgccattcatctcttacctgtagaaggagaatcagtcattagagatccccaaaagggttaaaaactcggaaaggaaggactgaatacttagattgtcctgtgtattctggaggaaggaagcaccagtggtcctatagtaatccagtatgtgttataataaagtgaatgttgaaattaactgtattcactatctctagtccatgtttttttcaattctggagttgtccttgagtacttgtctaacattgtcttttgaatattctaatgg

SEQ ID NO: 36158 - DNA, 1099 bp, Mus musculus
aagttgaactttattgttttaaagaatacatttttgtttagtgtgtgtgtacatacatatgccagggcccatgtgtggcaatcagaggacagcttgagggagttgggccactatttccaccatatgactcctgggactagtactcctcttgtcagcttgacagaaggcacctttttttttttttttacctgtgaagccattttgctgccccctacattttatctattttgtgtggatatgtgggtgtgcatcccacaacatatatgaggaggttagaggacaacttgctggacttggttcactctttgcatctttgcttatcagacgtggcaacaaggaactgttttttcattacctgctgagctgttttggttgaccatgactggctttttaaaatgagaactatgtgtgtatgtatggtggactgccatggtggactgtatgagagtgtgtgttatgtatctgccatggtggactgtatgtgagtgtgtgtatgtatctgccatggtggactgtatgtgagtgtgggtatgtatctgccatggtggactgtatgtgagtgtgtgtatgtatctgccatggtggactgtatgtgagtgtgtgtatgtatctgccatggtggactgtatgtgagtgtgtgtatgtatctgccatggtggactgtatgtgagtgtgtgtatgtatctgccatggtggactgtatgtgagtgtgtgtatgtatctgccatggtggactgtatgtgagtgtgtgtatgtatctgccatggtggactgtatgtgagtgtgtgtatgtatctgccatggtggactgtatgtgagtttgtgtatgtatctgctatggtgggagtgtgtgtatgtatctgccatggtggactgtatgtgagtgtgggtacatatctgccatgatggactgtatgtgagtgtgtgtacgtatctgccatggtggactgtatgtgagtgtgggtatgcatctgccatggtggactgtatgtgagtgtgtgtatttatctgccatggtggactgtatgtgagtgtgggtatgtatctgccatggtggactatatgtgagtgtgtgtgtgtatctgccatggtggactgt

SEQ ID NO: 36159 - DNA, 1167 bp, Mus musculus
ttactaattatattacttgtaacttactactatatgaatactgttattcaagtgaaaataccagttatcccagctaataaattttcagcgactcaattttgaaaaaaaaaattctttcgcaattctctcctaatgttccagttgagttcttttcaaactgttcacccgtgccagcagtttaaagagctgcttagctgtggacgctcgggcgaggtgtaggcacttgttatttctgtggattagggtggttgctagttagcagttgcttttgattcgacctactacgcatgtatccattcattttccttatatcgatttttgtctgagagtggaggaaggaggaaaggaaacagaaaatgaggcaagaagagagagcactttttcattttcaggcccccaatgggactcagtgagcatagttagggaattgtaaatgaggccctgggaaggcagagtaaaaattctgagaactcggagattagaactgtttcttttccagagctacagaagagtaatcgttatataaccagcaaaaaaggaggcagcttgtgcttagagaccacggagaaaaagggtggaaagctcttactgggagcaacttgagatgatctctgagaggacaatagggatggttttgtctctgcaattgtcttctgcggctcaggctggcatcaaacgtgccgtgtactactctgttccaacgccttagctccctccctctgcctcctgaaggctgccagtacagatttctgccaccatgcatggccaagagtgatggtttatttgatgatagaaatgacgttataaaggggtgtggttttcagaaacctctgttcctaggctaagccacaagtcttgttggcaacataagcttgcattcatctctgctttggagagtgagcatgttggagtggtaactgtttgagttctaagtggggcactgccctcttcacagtcccttccacttctagtctcctttaggtctaactactatttgctttgaatgattttgttttgttttgttttccctcttcagtgtagtgttcttcaaagtctgcaagaattactgcagaattggctgctttggctctctacggatgcgcatgtgcagcccacgacagacagtcctctgtgagttaatcctgtggccggccacagaagtgttct

SEQ ID NO: 36160 - DNA, 1108 bp, Mus musculus
gcttcgttcagcctgccctaattcaacaacaggggtcagctgcttctgtccataggttgggtgcaaatatctacatctgactctttcagctgcttgttaggtctttcagaggacaaacttgataaatcccttttcatgagcactccatagcctcaataatagttgcggactattactgggcctgttgctagaccttcttttcctcaggctatttggattctcttatcttctgccagccacattattcattagtgcttttaaaatctcatattttagaaaattgtaagcataatcaaaggtagagctaagagggactatccctgaagagaggtggaaagattggaaaagctagagttctttgtaactttaatttttaacccttatttttaatgatggtttttaagcactttaacctccctggtagcccaccacccactaacggtagtggaaaggagaggctatgggggaagtggacctgcttagaaaggttttttggagcagctcccatctgtgttgtctggaaattagcagtttagtttctaagttagtagcagaggcagctcagtccactagcaaacacttaacagatataccagcagtccagtttggtagagtctggatagcaaacacgaatcagtagtggtggcactatagcagagcagccaggcccagccttggcacgagtcagcaggaaggaccagaccctgagggacaccaggaaaaattttgtgctgtgtctctctcagggaagcaaagatcagtgagtttgtgagactcacaagttttgtatatctaggtgtataagtaagcttagctcaacctccgtcagtgtccattgagacctatttatacatcatgtatcctccatgggtcttgtctcagcatgtgtcttaccttagcacatgtcttgtagtagcatgtgtcttgtgttagtactgtgtgtctgtctcagttgatcgcactctgccagtcagcccaagtctgtggaagcaacaggaaactgcagtacaccaccagaattgtgtgtgtgtgtgtgtgtgtgtgtttctctctatggagtcccgacaaatgtagctcgactacacatgtaagacagatcaatatatgt

SEQ ID NO: 36161 - DNA, 1209 bp, Mus musculus
gcctaagttggacagtcgggctgaggcctgttttgtgaactgcgttgaacgcttcattgatacaagccagttcatcttaaatcgactggaacagacccagaagtccaaacccgtcttctcagaaagcctttctgactgatctcagcattacctctttggaaaagtagttcaagaattgaagagctgctgatgaggtggttgaagaaatggctatgggggggattaaactcccaattttctttatcgtcttgggacatcttgtcacctgagaatgaacaaagaccaatttttatgtatgggagttgagagtcatgtgtatttggttgtgtttttaaagctaaccatgtgacaataattgacagataaatgaaagtgtgagatgcatataactgtatatgggactgctttctcaaggtccctttactgctttataaaataattttgataggtggactgctttctagaatttgatagtgggaccacatagggtaaatcttgatttgtatgggttcatttctgatttttttagggagatctttgtgtcagtcaaattggcagtggggaaagatcctggcactgtttaactgtgagctttctttcatgtctgacctggagctgaaaaaaagtcctatggagtgttcctgcaatccaacttcttaggttgtctctcccctatactgtgacttacttaactcgcaaattgaaaatatggtctcaaggtagaagaggaagcctgagaatccaaagggctttagtcataaaagaatctagctcatgagtactattcttattaccagacagccacgagaagaagttaacttactatgtatatccagatgcaaaacattcacagatgtgcctaaagaaaccgcgacttaggccagttcagaactaacaactgtttcaggtagaggtgcatgcctgatggtagacatcgattccattaactgcattcttttggtcactgaaataaaagctcgcaagatcaatgttgtgacgaagaggctttctgttttgggtttttaactgcaaactccgattttgggctcactaccaagacagaaatgtagttggtttctactctagaggtccccgaagttttcatgagaagaaaatacttggtgataagaagggaaaaactctgtgctaacaccttaagtccctgatagaggagcttttgtggacatcccctcttgtttttatattctc

SEQ ID NO: 36162 - DNA, 1187 bp, Mus musculus
aggtttgacttggtatcttttctaggctaaaactacaaagaagattgtgctgagactggagtgcgttgagcccaactgcagatctaagaggatgctggctattaagagatgcaagcattttgaattgggaggcgacaagaagagaaaggtactctccttttgaatgtaaagccttatttgtagagctaactgtctcaggcctcggtgtatatagggtaccctccaagatattatattgtccacagctgagttacataacccatatctgaatgcatgggaccagaagtatttttttttatgttctgtgaatctggcatatgctttattagtaggcacaaaagtttgcacaagtgcaaaagtttgaacaccaatatataaaagaaatggcctctacgatttcagtatttggattttggctgtggctgggattgaacacaggaccatagattatgtaaaaaggttccttaaaaattacaaaacacaacattttgtttttctgttctgtttacagggccaagtgatccagttctaagcagattttgttatgaagacaataaaatcttgacctttcaacccctttgattgcagttgttcgtttgggagggaatacattaaaagctttcagaaattacctgaagtttttctcctgttgagtggtatgaaatgtgacatgttggcatcctacttggcatttaaagtcacgggttacaaatgataagaaaacgcagtgtagagacttttatttgaaattttttattttcaatacattccagatttttatccccttcccagtccaccttggaatattgcacatcccccacctccccagaagatgcccccaccccctgaggtagagacttgtatttcaagggatttgaggccagtaataagctttaaatatgttttgcttcaggcattttctttttttttaaaagattattatgcaagtataatgttgctgtctagagaaccagaagagggcatcagatctcattgcagattattgtgagccaccatgtggttgctgggatttgaactcatgacctttggaagagcagtcaatcctcttaaccgctgaatcatttctccaggccctcatttttttcccctgagacagggtttctctgtatagccctggctgtcctggaactctgtagaccaggctggcctcgaattcagaactcatc

SEQ ID NO: 36163 - DNA, 1169 bp, Mus musculus
ccttaaagaaacacaaggaaagaatagggcataggtacatcgaaatcttcaagagtagccgagctgaagtccgaacccactatgatccacctagaaagctcatgactatgcagcgcccgggtccttacgataggccaggggctggaagagggtataatagcattggcagaggagccgggtttgaaagaatgaggcggggtgcctatggtggagggtatggaggctatgatgactatggaggttataatgacgggtatggttttgggtctgatagatttggaagagacctaaactactgtttctcaggaatgtctgatcatagatatggagatggtgggtccagtttccagagcaccacggggcactgtgtacatatgagggggttaccatacagagccaccgagaatgatatttacaattttttctcacctcttaatcccatgagagtgcacattgaaataggacctgatggaagagttactggtgaggcagatgttgagtttgctactcatgaagacgctgtggcagctatggcaaaagataaagcaaatatgcaacacagatatgtggagctcttcttgaattctaccgcagggacaagtggaggagcttatgatcatagctatgtagagctctttttgaattctacagcaggggcaagtggtggtgcttacggtagccagatgatgggagggatgggtttatccaaccagtctagttatggaggtccggccagccagcagctgagtggtggctatggagggggttatggtggtcagagcagtatgagtggatatgaccaagttcttcaggaaaactcaagtgactatcagtcaaaccttgcttaggaagcaagggaccatccaataacatctacatgaataaaagctatctttataggaactggatagagtagggagggtgtctttatatccagtatgattggtaaatgggaagtacaactgcttctgatcactattggtcagcttctttcttctttttcctttttttttttttaaaaaaaagaacaaaaatttaagttttaacagtttcgcattacaagcttgtgattcatgcttactgtaaagtgaaagttaagattgttttcaaactttaagctcagcaattttgaacactgaaaatattcatctaggatgtaataacaagtt

SEQ ID NO: 36164 - DNA, 1198 bp, Mus musculus
aggaagtctggaaactgctgggatccattgtccttgcctcaggccaggtggcagggcagcttctgaggcctggacttgcctggaactgcccagttcctagaaacagagatttaggcctagtctcctgaactaccaatttgaagcctgttgtggagtcagcttagccatttcattccttccttttagtaatgggccttgaatccttaaaatgttcttgaggcccctacactagcagctccagccagccctatgtcaaggagagaacctggtagcactggggaaatagctacccttttaacttgattgttggaggtgctagtgaaagtataacaacgtaaaaacagaattctaggcctttaggcccaggcttggaaatgtggcctttgtaaaggtatgctaatcataaaacagatagacaatcctccacccacccgcttcctgggttcaaagagtgctcattcatagaaagtcacccagaacctgcaatgcaaatgtactattgttaggggctcttagaagctgtcttgagagttaacacttaccaggtattccttgtgactcttgtaactttacacttccttgtgactcttaactggtacctttggtatcttccaacaactccctccctacttccttgagctgtggtttcttcctttaaatacccccttacccagctacttggggcgccatggtcctctacccctgcgtggtgtatgaccatgggcccgagagcgctcttgaataaaaatcctcttgcaatttgcagcaagacctgtttcttgtgggtgattttggggtgtcgcctctcctgagtcagaacgtgggggagtcctcacgttgtgggtctttcactagccggttgaagacatcctctccagagtaataagtcactctgagtacaagctgtactagaatatgaaaatccacagaagtatttacaagcatgccataaatgcatggagtaagctccaaggtgcaagcccaccaagcattcagtgggggcagcatttattctgcaacagtagtgggtacagtgtggttgcatggatgggaaagggctgagggtaccttatttccaatgcagagtccctgttcggtaaccaacagttctgtgttaagtccgagaagagaagagtggctatccaattggccttcttgccagccactgagaacttgatgacaaggctgttgcatcgac

SEQ ID NO: 36165 - DNA, 1169 bp, Mus musculus
ttaagtgtcataaaattgtgtaaaagaaagagtctttaaaatttttacaacctggacattttcatggcgaatgaaactgtctttactgcattttccccttactgggggcgaaaatgatgttaacagaaaagggaatacagacaaagaaagtgaaggctttgattgtatggttttcctctttctctagctgatttgatggtggaattgttgctaagggaaggcaggttgtatagaaagccagtggggagcgttagtattgtagcctaagagggaaaagaaaggattcttcaaagatgcagaaaaggctacagtcgaggcctgggagtgggtgggggtacagacccttcctagtaaccagggaccggtaaactccaaccgctagatggtgatgacacttgtgggctctcagattggagagcgcagagatgagtgacagggcggggcgctctggggcttggcgcacggacgcgaggagggggttgcctgtgcgtacagaagggggtcctgttgactgctttctgaccagtggggggttgtgaggaggagggcgagcgatgacgcggagcccccacgtgacccggagctgcagagcgacgcagccttgggtgcagtcgtcactctcgtctggccaccaactccccgctgccctgcgcgcggcgggctggcatccggcccggggcgagcagagcaggtaagggcccccgggcggctgcgccgcggcccctgttagccgccgcctctcgatccctcagcgcaatggagatggattggggagggggctgtccatgctggatcaagttcaaggagtcttcccctctgattctcccgtgccccccccccccagcccctagctaaatctgtgccggggaaccctgtgctttgacagggctgctggtagggagagtctctagagggaaatacagagggaaacgtccatcctctttaattaactccatcaatgggcgtccgcacatgtccgcgggcttcctgctcctttcagaggagggacgcgcgccaccgtggcatttgctgagaaaatggtgggccttaatgcctggacggcgggctcggtaggggtggtgtctcagaaggaggggagggacctttgacaaccggattccataaaggagagtgttgggatgtgtggccttggtactggcagaagcatt

SEQ ID NO: 36166 - DNA, 1517 bp, Mus musculus
aatgggattggtgttgaggactggattgctgctgagaggtggatcaaattcaggtttcagactatagatggagactgggagaatagtgtttcctggactgaggatgagagtggagccactattgggccctggactggggcggctaatgacaaggctggccttgttagctcctgggctgtggcttgtgatgaaagtagcattaagtcctggactggggctaggcctgagaatgaggttgctcttgggtcctgggtaagtgctggtgaccaggccactggagcaatctgggcaggagctcagactactgatgggacctgggttgcagacaaagccagtgcaggttcctggactggggccgagaaccagatcagtgcaggttcttgggttgtctctggaaaccaggccattgctgggccctgggctgtgagtcaggtcactgatgggtcatggcctgcagtccaggctagtggagtgtcctgggttgtggaccaggctactgggacctggactgtagctgagaaccaaactggtgcagtgtcttgggctggagctggcaatatagttagtattggatactggactggggctgtagaccagaccaatgcagtgtcctggacaggaactactgatcaggttggtgttgaggttaagccaaggtttgaagatcaggccagtgaaaaggggtcttgggttgtagctggtgtccagactagtggagagaccaggttgggatctgaggatcaatccagtggaaggtcttggactgagactgtagaccaggccaatgcggcatccaggcttggaactgtagatcaagctggtggtacatcctgggctggaaccggagaccaggttggtggagtatctacatcagggtctgcagaccagtccagtagtggatcatgggctggcacgaggaatctggctggggaaagatcttggactgggactggcgatcagtcggatggtgcagccaaacctggttttgagaatcagaccagtgatgaagggtcttgggctggcactattggccagcctagtggaggttccaagtcagtgtctgaggctcagtctgctggaagatcttgggcagattctgcagaccaactcagtggagggttcttggttgggcctttggaccaggccaatggagagtctcagcctgtctctggggaactggctgctagtggagtagatcagactagtggaggaggatgctggactggttctggggaccagtctggtggagaatctaggctgggtcccagggaccaatcgaatggagagtcttggcctggcactggagatcagactggtggatggtactgtacttacactgggactcagactattggaggaggcccttgggttggggtcagtggccaggatgttggagggccaaagccagtgcacatgaaccaggctactggtggggcctggcttggcactgggactcaggtcagtgcagtgtcctggactggtgatcaagttggtggttgttccaaacctggatttga

SEQ ID NO: 36167 - DNA, 1200 bp, Mus musculus
aactttttccgcttgttatctcaggggggtggaaaaatcaaggttgagattctgaaaatactttcaaactttgctgaaaatccggacatgctaaagaaacttctcggtacccaggtgccgtcatcatttagttccctttataattcttatgtggaatcagaaattcttattaatgcccttactctatttgagattatcttcgacaacctcagagcagaagtgttcaactacagggaattcaacaaggggtccctgttttacttatgcactacatctggggtgtgtgtgaagaaaattcgagccttagcaaatcaccacgacctcttggtgaaagtgaaagttataaagctggtaaacaaattctgattgatctgtgccctcaagatgtgtgatctctcggttttacactcgggaagcattaacagtgagacactattgtttttctacttgtgtgtgtagtacaggaattattcagatgccacgtttgaataattcagagtgatgttatctgtgatagtcaccagctttaagctgaaccattttctgaataccaaatagtcccgtagtcctgtagtcctgtggtttgacttgtgctgcttgggtgggatattttccctgggtcctctatgtgaactaatagcaatcctgttcgtgaatggcctactcagctcttacttgttttgacttgaattttgtcaccaaagacttcatatgtgtaccatcaataaagtgtatgttgcaaatggcaagaagttgttctggtgctttaagtaagtctgtctgccaccaatcacagacactatagcatatgccagcaagattttgctgaaaggaccctgatatagctgtctcttgtgagactatgccagggcctagcaaacacagaagtggatgctcacagtcagctattggatggatcacagggcccccaatggaggaactagagaaagtatccaaggagctaaagggatctgcaaccctataggaggaacaacaatatgaactacccagtaccctagagctcgtgtctctagctgcatatgtagcagaagatgtcctagtcggccatcattgggaggagaggcccttggtcttgcaaactttatatgccccagtacaggggaatgccagggtcaagaagcaggagtggatgggtagggagcagggtgaggggagggtatagggaactttcgggatagc

SEQ ID NO: 36168 - DNA, 1150 bp, Mus musculus
aaagaagattaaagaaaaggaatcattaggattttgatacaaattaccttgaaactatagattgaagatatcactatctatataataatgtttccagtctatgactacagaacatttttccatttaagtttttagaatgtagtcccttttattaggcagactctcactaaatagcttagcctggtctggagctctacatagcccagctgatcttaacttgtgttctgatttctcagtgccctgaaagatagatctataggcatgcacttctagtcactttttgcaattaaaaattacatttcagatcatttattactagtatatagaaatataactgataattatgagttgagtgtataacctgtaattttgttgaattaatttactgactttgatagttttcttgtgggttctctaagaattggtattatgtaggaccatgtcatatcatctgtaaatgaaagtgctttttctcctttcttctcccatctactttagaaacaaagtctcatgatgtagcctagactgccccagagcttctgatcctcctgctccaccgtctgagggctgggattgtagggatgtgccattacatggtgctatggattgaacccagcccttcctgaatgctaagctaagcaagtactgtaccaactgagccacatcccagctccttcttccttctgtttccttgtgtgtgtgtgtgtgtgtgtgtgtgtgtgtgtgtgtgtgcacgcgcacgcacacaaacatgcaaacatgcttgtgtttttttcatacacctcagaggccagaagagggcatcaaatcccttggagctagagttgaaggtgtttgtgagccagctgatatgagtcctgggaatcaatctgtgctgagccatctctccagtcctgcctctttctgttattacttgcctacatttttttcttatctactttccctggctagaatgtccagtacagtggtgaagaacagtggtgaaaaacgagtcattgtcttgctcctcactttcctgtgaacagtttttagttgttttttttaactacttaatgtgttagatgtgagttttcatgtatgccgtatcatgttaatgaagttcctttctatgcccaaatgtatgggcaggttttattatgaaagggtatca

SEQ ID NO: 36169 - DNA, 1757 bp, Mus musculus
agtctcccaactcttccccaagccccctaactacaagaattacaaacatgtgtgtccttccatgtctggcttaaggttcaacttctttttaaatttaatatattttaattttgtgtatgtatggatgtatatggatgtgtatatgtgagtaaagccacccaaagaggccagaagagggaagccatcatcctagattcatccgttgtcactgtagaccttcagttagatttcaacctctgaaattaagttcatggagacttattttagaagactattggggttgagggtttttgttgttgttgttgttgttgttgttgttgtttgatatagtgccctatatatgttaagtctgactttttaagaacctatttctatttttagctatatatatatttgtatgcaagaatatatacttctatatttatatttaggatatctttgctgagctcatttatagatattttattcacttttgggtatggtatttgcagagaatatcctgtgggagttggttctctttgtcaatcatattgagtcctgaggcttgaactcaggttgtcaacctaactgctaagccatttcactgtctttccctgtcttacactgtaaccccattctctctatactttcttccttttctcttgggaaaatatacatattttttccaatggaaggacaaaaagtattttaccaactccgccctgatatactttttgagctactccctaactgtgtatcccaacagtaaagttgtccttgtgatttctttcttatcttttagtcttgccacggttttaaatcaggcttctgttctacatgaaattcatgttacaacatttttcagggccatagaaaattctgcaatcttcgtgtgataaattaggacctcggagccttttgtttagtggggttttatttcaatgagataacatagttgaaggaacttcatgttctccaaagcatcttacacgagaacttgctaaagattactgaacctgtgaccaaatcaaaaaaaaaaaaatcatgttactagataaaggctctttattcttcatttttctgaacggatatttcttgtgaattaaaactctagcataaaaaacagattgagtgcccgtgtcttgcattggtgtgtaaatcctagggcgagaaagaagcaagatggaaaggctccaagatggcacccttttcccttgagactcctggtaaactcatggtcattctctactgtgtcacaaacctttctcttccctgcgcctccactgacatggatttagaattgagttacacttttattttacacaaacgagctctactgtgtgaaaactaatttttttttcttttaggaattgtggtcagatacaacagaccttcatccaaattttccttcaggtgtcaaggtagattaaatcaggcacattccaagagggtataaaaacttgtttttctgatgtaacaagtgtttcctgaacaaagcaagaaaactttccaacaacgtaaaagtggcttgaaagagtaaagcaaagtggcttcctagagagtttttggtggctaggggattggtccaggattagtttcggttggttggttggttggtggtggttggtggtttttttcccttgcttttggtttgaacttttcttcgatgcctaacaagagcaccctgatttcttctcagtgtgtccatatgtgaaagaaacagttatcagcttgtccatatgtgagacagtgtacaggagagtgattaaggtcagaac

SEQ ID NO: 36170 - DNA, 1099 bp, Mus musculus
agacattattggttcttggttttgggctggggatgaagacaggtttgagccagctgctaagattaatgaagagaacaagatagcatctgaagatgaagatacagttggatcctggttctggggcaatgaagaggccagtctagaggcagtgagaaggggtacttttgagtctgctcctgggattaaggaagagaaagttactgggtcatggttctggactgataaggccaaagtaggggctgggtcccagactgtcgaaactgggtcagaaactgaagaggaagcaatttttgagtccttgatctgggctgcaaaaaaggacagtattcaagcaggagtaaagcgtgtgtccaagccaaaagatgacggtaacatagctgttgggtcctggctctggtctagtgacaaggccacaaaagaagctaaaactctgattgtcagtgaggccagtccagaaaatgggaaagagtcagttgttaagtttgggtcaagagcaaaagatgaggtgattaacaagactggcagtggtgacaattgtaaacatagtacagaagctgaaaccatagtgggagcctggttctgggaaggagatgaagctagctttgaatcaaatcctgtacctgtatgcaaggccgtttgtgaacccgagtcttcagctgagcacgaacctgacccttcccgcaggcctcagagctgggatgaggtcactgttcagtttaaggctggtccgtggggaaaagctggcttcccacccatgaaccccttcagattccccaaagaagcggcatctctgtttgcagaaatgtttgggggaaagcctaagcttgtggaagttggtccagaaagggagcctgaaccccagttcccatttcagtatgatccctcttaccgctcagtccgagaaattcgcgagcatcttaaggccagggaaagtgcacagccagagaattggtcttgcaactgcatccagtgtgagcttagaattggttctgaggagtttgaggagcttcttttactgatggacagaaatcgtgatccttttatccatgagatatctaagattgcaatgggcatgcgaggtgcttctcagtttacccgg

SEQ ID NO: 36171 - DNA, 1235 bp, Mus musculus
taaagacatacccgtacatatacaagaagctgagagaataccaactagacaggactggatactaaattccccatggtatattatagttaaaacatacatcatttatctataaatagaggatatgagagctgcaaaataaatccataagtcacacacatatggtttatatatgtgtgtgtgtgtgtatttcatatatatacagacatatgttgtacatgtatatatatgaaaatccatccttaaagtagctactttctcaatgaaaaaaattaaagccagaggaacctggagtaatgtgctccaagttctaaaaggccagtgacatcaacttagactacttacccagaaaaattatatctttcgtagttgaacatcaaagaaaatcttttcatgatataatatgcttaaaaataagtcaatcaaaccagccttattagagaatactggaattaatacttcagactgaagagagaaataagcaaagccaagagactatagaaggaaaataaatttagttataagtactgagatgcaaagtatgactatgaacaaaaaccacaagaaacaaaaataaataaaacaacaaaatgactgtaatcaaccgcaggccggtaggatttgctgaaggaggcagaggcaggaggatctagagttcgaggctagcctgggacacacatttcaataataactttacaattattaatggcttcaactctccaataaaaatatacaggcgacttaaatgaattaagaaaaaagaatccgggctggtgagatggctcagtgggtaagagcacccgactgctcttccgaaggtccgaagttcaaatcccagcaaccacatggtggctcacaaccatccaaaatgagatctgactccctcttctggagtgtctgaagacagctacagtgtagttatatataataaaaataaataaatcttaaaaaaatgaaaaaaaaaaaaaaaagaaaaaagaatccatggtttttgttgtctacaagaaactcaagctttgtgttgcctataagaaattgaactgctgggcgtggtggcgcacacctttaatcccagcacttgggaggcagaggcaggtggatttctgagttcgaggccaccctggtctacagagtgaattccaggacagccagggctacacagagaaaccctgtctcgaaaaaagaaagaaagaaagaaagaaagaaagaaagaaagaaagaaagaaagaaagaaagaa

SEQ ID NO: 36172 - DNA, 1216 bp, Mus musculus
agcttttccatttgctgtctcagggaaatcgtaagactaggaatcttgttttgaaagtatttttgaatatgtctgaaaatcccaaggcagccagagatatgataaatatgaaggcgttagcagcattaaaactcatctttaaccaaaaagaggcaaaagccaatcttgttagtgctgtggccatctttattaacataaaggagcatattagaaagggttcaattgtagtagtcgatcacttgagttacaatactcttacagccatattccgtgaagttaaggggattatcgaaagaatgtaaagtgacccagaaattaaagagaacactgaacagtgtccaaaatttgattggctgtacatgcccaaagagttttgcataatattttggtaattactgctcacacatttttgtcttaacatcttttacatattattacctgtggcaggttctagctcaaagctagaccatttttgatgtatcaaataaatattaacatcttgagataaaaaagtttattgatttctatcttatctagattagcaaatttgtaacattttacttaaggaaactgtgatccaactctcagaagtactgtgtcttgagggttagtatctgcttagatctgttggtggctccagagagcaaaagagaaactactgctcttgtaatctagttacagaaataaggcatacgcaaataaagatatctgatggtacttacattgtgtgtttgtgtatatgatatatacatatatacctattgccaaacgtgcactcttgtttcaaaacggagggaggttactatatgctattagatataagagtgaattctgttttccccctttatccaactatatcaaacatttcattacagaatacaaaatggccctgaattacacaaaaactacaatatattcattttaaaatttacttttataaataaaattcaaattttagacaattttatctgtcacatcaaacaagaaaaaggtaagcatgaaaaggaagtgttttattagttgccatcacacacttagattggcatattttataagttttattccttttatggtgatcctgtgagctagctagctcatatttttattatctcttattctgagcatttcccaatcataattataaccagtaagtgcttttccctagctcttcacagcacagggggcacaggtggcttttctcccactagaaccagtc

SEQ ID NO: 36173 - DNA, 1118 bp, Mus musculus
tacgtcagagttatttatttggtcaggacagtatccagaaggtccagcattcttggttgacaaggttcttatgtttccacttggccgcctttatatatttctcaaaaatcagttgtcgcatatttaatttaaatttttcctatttccctgtaagcaaaaaattaagtagtgaaacttttgaatattttatacccatctgttgttactatgtaaatgtaacaatatttctagaatctaccatgttccattgttagacttgtatatgttaatctcaatgcagttactatagcttttgttctttatggtttttcttttttccatttttgtacgtaggtgcatgtaagattatatatgcatgtttgtttatgtaatggcatgtgtttttattagatattttctttatttacatttccaatgctgtaccaaaagtcccctataaccccccccccccccgctcccctacccactcactcctactttttgaccctggcgttcccctgtactggggcatataaagtatgctagaccacggggcctctcttcccaatgatggccgactaggccatcttctgctacatatgcagctagagacatgagctctgggggtactgattagttcatattgttgttcctcctatagggttgcagacccctccagctccttgggtactttctctagctcctccattgggggccctgtgttctatccaatagatgactgtgagcatccacttctgtatttgccaggcactggcatagcctcacaagagacagctctatcagggtcctttcagcaaaatcttggctggcatatgcaatagtgtctgggtttggtggctgattatgggatggatccccctcccctcgggtggggcagtctctggatggtccatcctttagtcttagctttaaactttgtctctgtaactccttccatgggtattttgttccctattctagggaggaatgaagtatccatgtgttgggtgttccttcttcttgattttcttgtgttttgcaaattgtatcttgggtattctaggtttctggtctaatatccacttgtcagtgagtgcatatcaagtgacttcttttgtgattgggttacctcactcagg

SEQ ID NO: 36174 - DNA, 1138 bp, Mus musculus
gtttttaattttattggttatctttgattttttattggtatactcttgcttgtttgtgccaatgactttagtgccacttctgccaatattaaggaacatcctacatgttcttctatgagttgtaaattgtcaggtattaagttgatatcttctttgttatgtttggtgtttctgttttgtgatactttctatatgctaaacaagcaatctatcagtgaaatataccacctagcactttatctttaatctactttaaatttttgggagggggcatagtgcaatttagggatccaaattctcaaaaagaatttcattattttgtatgtaactatccagttttctcagcaacatttagtgaggagacaattttttctcaattgtgttcttggcaggcttgtccaacattattaaccatcagaagaaggcagaacaaagctactttaaggttctgtgtcacactagacagacttgcattcatcaagaaatcaaataacaaaagatggtgtaaggatgtgggggagaaggcgctcgtattcactgttggtgggagtataaacaggaacagccactgggtgctttgaatgagaatggtccccacaggctcttatctttgaatagttgtttcccagtcgttggaactgattgggaaagattagctgagctctggttggaggagtgtgtcaccaggggtaggcttgggctttcaaaggactcaaatgtcactctcattatgctctccacttcctgtctgaagatctaaaagtgagctctcagctgcagctccagcaccatacctccttgcttgcatgcgtgcctgctgctatgctcccatgctatgatggtcatggatcccaatccctctggaactgtaagacccaataaaagtttccttctataagttgctttggtcatgatgatttatcacagcaacaaaaatgttactaatatagacccattataaaaatcagtgtcggggttgctcaaaaagttagatatagaaatactgtatgattcagttataccactccttgatatattcaaagagtttgacaccctatgacagagatacgtgttcaaccatgttcctagatatttatatagctaggaaatggattctgccttgatgtccatcaaataa

SEQ ID NO: 36175 - DNA, 1134 bp, Mus musculus
atacaaagaatcacatatacactttaaacttattcaaagggctttttttgtaattatagtaacccccttcctgtcttgtaatgattattaacaagaattttgggggtttgttcttaataaatgtcattgcagttttatttcaaaagtacaaatcttcatatgaaatgtggattttttgtatgtttaatctatttagagggataaagaagaacaaatagacattaacatttggcatgtgacttggacatgtgcctccttccatattttccattagaactaatagactgtgcttcttctcatgtatattttctattagagcaatcgaaacacaccttcctccatgcatattttcaattagaggactaaaatgagccttcttgcatgcatatattctattagagctgttacaatgcacatatccattttcttattttctaggctttaatgagcaagagcatattctgtggctgttcccagggccctggaccaaatgtgactctgcttttgtactgaatcccaggggagactctggagcttgagtgctggacagtttcactgtctgtcaccttgcctcccctctggactcattgctggattaattaggtaggtaaacacagggactaatgccaattaaatagcctttatgcttggagaattcagtgggaaactcatttcacttaatgtacttcaatgaaacccagcaaagcaggtatatactgactgctaacaatgtgggttatctaggagatgtacctgcttatcccttgagaatctttaacatccctggctgatggtacacctcttggactgtcatgtagatagaaaaactagttctaaactatctgcttcctagttcccctagctttaagtttctcctgctatctctgtcttgcttttctgtaggatggtctggggatacttacttggtcctatttttttttaattcccaaatcagggattctcttgttgtagacaaaagtgaggaatacatgaaagaaagaaacttgtaaaatataccttaaactctattattcatggagaagcattagcattattaacttagatatactagtagacaaaaatgaatcatatctttaagaaacagaatgatacaataagataatgatgtcttta

SEQ ID NO: 36176 - DNA, 1775 bp, Mus musculus
aggagcgcgcccgtgcgcctgcacgtctccaggatcctgctcaaaaaagtggaagacttcaccggacccagaaagaagagcgacctgggcttcatcaccttccacatctctgcggatctggagaagactttcgactggaacgtcaagcagctcttcctttatctgtcggcagaatattccaccaaaagcaacgctgtgaaccaggtggtcctctgggacaagatccttctgcgaggcgagaaccccaagctgaacctgaaagacgtcaaaagcaagtattttttctttgacgatggacacgggctcaagggaaacaggaatgtcactttgactctctcctggcaagtgataccgattgctgggatcctgcctcttgtgactggatctggacgcgtgtctgtcccgtttccagattcctatgaaatagccacgactttttgaagaattctctctgcattggaaacggggacatctgtggactcaagaaatcgcatctcctcatcatttccctcaagtcttgctgacttctcttttgttttgtttattttaaaacatgctggttttgttctgggactggctgcactcatcctcatgcttccctgagcctaacatagagactatattcattgatcttagtgtgtgtgtgtgacattggttatcactcttcctctgtataagaattaacatcaaattttatagttggagggaaaggctaatagagttctggaactttctttattctaccaatgaaacaacaaagaagttcaccagagtaggttattattagacagttggataatgaggattgaaaataatacacagttttgtcatattcactacattatcccatgtgatatataaaatttggggagaattttaaaattagatgttttggtattgtcacaataactgtattttattcctgagattccttgtaggtccacattgaatgccgttttcttatatcttctagggtgtgtttgattactagaaaaattgtgatttgtttcgtaagagtctgacatgcaaaatagttaaacacgagtcagaaatcttactgctttccttccttgccagcaaatgtgaccatttaaatagtgaacgtatcttgaggctgtaaatgattctgcctctctttaagtgtgtgtcttacagtggtttctcaacaaagattgctgtgcagtgtatctttgtcttagcactgttgctgaagtttgaaaatgtttgcatgtttaacatgagatcgtatgttctagtatgtttaatgccattaaataaatgctaactgcttaaaactcttgtaggtccattatttaatcattattgggatgttgataattgcacttgtggtatgatttttacaaacattcatagattttttttctctataacctaaatagtaagcagtgcatgcattagctctcttcaaataaacagaaattcagaagttttgttacatcaagcaaacacgagaatttaaatttgaaatacaacttgatttttttgttaaatatttttattgtatgtaattataatttcattatttcctcttcctttacatttctccaaaccctctcagataatctcattgttctttcaaattcatagtgtgtgtgtgtgtgtctatgcctgtatctctatgtgtttgcctgtgtatgtatatgttatacatgtatgtgaatatatacatatattcctaaatacaacctgctcagtctgcataacctatatcctcagggctgaccatttggtattgaataatccattgctgtgtt

SEQ ID NO: 36177 - DNA, 1122 bp, Mus musculus
ggacccagaaagaagagcgacctgggcttcatcaccttccacatctctgcggatctggagaagactttcgactggaacgtcaagcagctcttcctttatctgtcggcagaatattccaccaaaagcaacgctgtgaaccaggtggtcctctgggacaagatccttctgcgaggcgagaaccccaagctgaacctgaaagacgtcaaaagcaagtattttttctttgacgatggacacgggctcaagggaaacaggaatgtcactttgactctctcctggcaagtgataccgattgctgggatcctgcctcttgtgactggatctggacgcgtgtctgtcccgtttccagattcctatgaaatagccacgactttttgaagaattctctctgcatcggaaacgggacatctgtggacctaaggaatcatagtttaaaactgtcaagaaacacgtgctgtaacaatttatgtgtcgcattcctgcatgcctacactgaatgtgatttagaagcagacgtttgttcacctcgtgtaaagcatgcttgattccttggggggggggggacagttaatatcgtttgttagataccataagtggtggaaataaagtgactaaagaccgagtacatgatgattctgtaaatcactgtaacacattattgatatgccgactgtctgagaaatatgggtctttccaggtttttcctccaaaagtttttctgttttacatttttttgaaaaaaattaatgttttaaccattgttagtgaaggttgaaaacgtttgcatgactttcccattgagtttcagtctgtatgcttactaccactaggtgctaattatgtacagttctccacaagtctccattttaataagttttggagtaatattaacactcatcgtttaatttttttcatttacaaactctcttatatgttattgtatcctattgccagcagtctcgggatgtatataatagaaacatgggctgtttgcagatgaacactgtgaacccctgaagcttggggaatcatttcaagcttaaatagctagcaaaaaaagtggagtctaactttgatcttggatattctcattccctaagtttattccacccctgatacctg

SEQ ID NO: 36178 - DNA, 1256 bp, Mus musculus
gaaagcaggaaagggaacgtgcgcagagctggatctgacctccgggagttcaactttcctgcctactttcctcccatcccatgcttctgttttttgtacctgtagaggtcttggaaatgggtttgcgggcaaaatggtagcctctggggtgggaggggttctggcccagtctcgtgcctgggttctgtgctgataagtccaggaagtaagcaatcttatctctcctaggagtgatggcatccaaatttaaacaagtcatactggatctcactgtggagaaagacaaaaaagacaaaaaaggtgggaaggcctccaaacaaagtgaagaagaaccccaccatctggaagaggttgaaaacaagaagcctgggggaaatgtccgaaggaaagtcaggcgacttgtgcctaactttctctgggccataccaaataggcatgttgatcgcaatgaagggggagaggatgttgggagatttgtagtgcagggaacagaagtcaagagaaagactacggagcagcaggtgaggccttacaggcgtttccgaaccccggaacctgacaatcattacgacttttgcctcataccttgaaatctaagattttctctgagctcataaaatggctactgttttacaagctcttatcaagtgggggtattttttctgtaaacttttggtgtttccacttaacggtttctatgtaaaattgtttaattgttgcatttaattcaaacattcctgttagcatggcaatttaacccattttagaaaaaaatctttttcataatttgaaattaataaagcaattttaaaagcaatatatgctcagtcatcttctacttcagttcttatacttccttcatagtgtctttcctctcccagctgcccggacactgcttttcttcacatccccaattaatcagtaaggaacagtcatacctttgattcattcattatattatgttctagccatgtatgtatagtgtttttcaaagagtgtgaccttaatgtctttcggataacaaagatgtttttaatataagacctctgccctctctacacccataatcataacgtagacttccaaaaccttaacattgtaacaagatctctaattctagaggatagtatgtgtgtatcatagattaagcacagacaaaagcagggtgactaattttagtagccaaaatattaaaaaccacaaggtcttacattatgatagtggggattatgacaaacgagggtagtcactgcaag

SEQ ID NO: 36179 - DNA, 1226 bp, Mus musculus
agtcaggagctcagaacctgacttgtctagttagaaaactttttggcaattaagtgacctgaaacaaaagtcagtcgctatgggaacacaaaagcttgtccatctgcctgacacctagtcggttttgtttccttgtttttatccccctaggattaattcattaagaaaataatcaacatgcaaaagtcttgtgacgagaacgaaggaacaccccagaacacaccaaaagcagacgaaggccatccttcagaagatccaccacagcaggcaggagaaactcttcaggcttctggagaaaatgtgagggaggaaactgaagggagccatagaggagagcctgctgaacccagcccagagcccaaagaggacactcccgcaaggcatctgaaccccgaagaagtgataagaggcgtagatgagttggaaaggcttagggaagagataagaagagtaagaaacaagttcgtgttgatgcattggaagcaaagacattcccgaagccgtccttaccctgtgtgcttcaggccttgaaatcgtttttttctctgatattgaaatgtggctgctgctttctttctcttagcattttctgatgtatctttgaacttcattttacttttaataataattacctggcggtattttctgttatgtagtttcgttgttaccagcatctcattggattttggatttttgacccattttccacgtttatctttcagttggaaagtttcacatttatgcatggaaatatacaattagacagcaaattgaaaaaaacagcagcatagttaggatcaactcacatagataggaaaattcctaattatgtgtgtacatgtataattatacgtatcaaaaaatttacagtgcttatttttggtgtggtgtgttttaattttgccttttacttatgttgattttttttaatgaatacgtgtctcacaaagaactgcagatttttttaataagtgggagttaattaaaattaatttgtaaccagcttgtagaggcaataaaggcactaaactcttgatgaactattaaacagaaatgtaaacctggaattccctctggcttccttagccagaggaataaaactggcaatcattatagacacacttggttaagacttggtcttttcatgggggaaatacttgcctcacagggatctgtgtggaacatagtatgccatatttgagagaggacatggcctcactcagcct

SEQ ID NO: 36180 - DNA, 1623 bp, Mus musculus
gggtcggcgtggagggatgggggcggccgaggcggcgggaagagcctgggcggtggcgctcaggacagcgccacaggtcctccctcccacctactcacccatccttctgggttgatcgcaggtctgagaagcagaagcttcgcggcgcacctggtggtgagcatctctagaaagaggagaaggcaaggataggcccaggtaggtgcaggggcagggctggggactaagaggaggaaagagaatgtgcgcagagctgggtaggtcagaggcctgcttgccacccctttaccgggttcatctctcccatcctattcttccattttgatgacgcagatgcatcagatatatctgcaggaaacacggtgggctttggggaagaggtgggccagatttcaaccctcttgagagctacggacctttcagatggggaaatgaattttgaatggtgcaaagcagagactcttgtcctcgttagtgatcaatccacgaagaaatcttttccttctcttgcttcttaggagtaatggagtccaaagatcaaggcgtgaaaaatctcaacatggagaatgaccatcagaaaaaggaggagaaggaagaaaagccacaagataccatcagaagggagccagctgtggccctgacctccgaggctggcaaaaactgtgcacctagaggaggtcgcaggcggttccgggttcggcagcccatcgctcactatagatgggacctgatgcagagggttggggagccccagggaaggatgagagaggagaacgtacagaggtttgggggtgatgtgagacagctcatggagaagctgagggaaaggcagctgagccacagcctgcgggcggttagcactgacccgcctcatcatgaccaccatgatgagttttgcctcatgccctgagtcctgagcttttctctgaagatgacatggggacccctgccttgtgatgtacaaattttgaggttactcctttttatgtagatctctccctgttaccagcttctaattgaaacttgtgttttttactcggcctataattcttttgttagcagaatttatcaattgcatgggaagatccgtattacctattgtgaacctaataaagcagatttaaaaggcatcctctgtactcatcttttctttatataagagtatgaacagccacatgagtggagtaagtagtgctcaccacgggaagatctgaaaaacgtttcccttatatttattttcgaagttgaacacattatttaatgaagaatttagttgcgttaagagatgactccccaatggaggagttagagaaggggctgaagaagttgaaggggtttgcagccccataggaagaacaacaatatgaactaaccagtacccccagagctccctggaacttaaccaccaacccaagagtacacatggtgggactcatggctccagctgcatatgtagcagaggatgaccttgtaggtcatcactgggaggggaggcccttgatcctgtggaggtttgatgactcagggtaggggaattcaagggcgtggaggtaggaggggaagcatcctcatagaagcagggggagggaggttgggataggggacttctgagggggtgggaaa

SEQ ID NO: 36181 - DNA, 1252 bp, Mus musculus
cgtaagcaaacggtgaggagacctttgtgcacagcacctgcccatctaccaagtcttccatctaccaccacctcctcctcctcctcctcctcctcctccccctccccctcccctcccccctcgcttcctagaaatcattgcattcccgtattctgcaggaagcagcaaagaagagaagcagacacaagatgaaaccctgccaaaaaatggaaggaaacctagaaaaggaggatgagccaaagcctgaggaagagccaaagccggaggaaaagcccgaggaggggcaggaacccgaggaggaggagaaatccgaagaaacttttcgggagaggctgatccggtctctgcaggattttcaggaggatatacacaacaggcacctgagcagtgatgatctgtttagagatgtggaggagctagatgagatcaggaaagtgagaaacaaacttatagtgacgcgttggaaggctaaccgaagccatccttacccctatttaatgtagcttggcttgctttcccttttatctgatgttaccattgcgatctagctttcttttcattagcattttcctgataagacctttgcccatcttcctactttgaatctgttgctgttagtggctttagctgtatctcttgttgtctgtatcttactgttgattatatttgaaccaatctataagtctctggctttaagctttactgatttgtaaaaaaaaaagaaaaaaaagaataacaaaatgagcttctgatgggatacaaaatgagaaaaggttacaaaataatatgggaatatcatattttgaaagacaggagtacctttgtatgttacatatatgcacatataaacttgtgaaagatgaatgatttttcttctgcttatttgtatttgccatattcctaaaatgaacacgcattattcttgctaaaaataataaaggttttataactaaaaataagaatccaacagcccatcaatttatttttaaaactcctgaggcgcttgttattcattgacaatatgagaactaccgagttaaaagattaaaattcacaactcgtctcatacgcaataataaacataactgtggtggtcacatgcgctgcagagctgttcaacggggctttatccccatttgctcgtgcaggaggctccaaatgctagagctttctttctgctattgggaagcataggaaaaagtaacaagctcaagcaacagttaggtgagtgctccatagttcttcctgcctg

SEQ ID NO: 36182 - DNA, 1251 bp, Mus musculus
aggggctcgaaatggaggctccctagaggttgcctggagactctaaggtgggaaaaaaataataatgaaaatccttgttgttaatctctgacttttgctggtcactgcatcgagcattcagtttgggtttttttttttttttcctccccttgccctgtcttgcttgtgttcaaagaatagcaaccaggaaacaaaatctcatcatggccaatgtccaccaggaaaacgaagagatggagcagcccctgcagaatggacaggaagaccgccctgtgggaggaggtgagggccaccagcctgctgcaaacaacaacaacaacaaccacaaccataaccacaaccaccaccgaagaggccaggctcgccgacttgcccctaacttccgatgggccattcccaacaggcagatgaatgacgggttgggtggagatggagatgatatggaaatgttcatggaggagatgagagagatccggagaaagcttagggagctacagctgagaaattgtctacgcatccttatgggggagctgtctaaccaccacgatcaccatgatgaattctgccttatgccttgacttcggtcattcccccctgagatccatactgtgactcccgctgtagcccttttcctcgcattttcctgacatgcctttaatgacccgtttgtggtgagccttgtgttatttccatgccatgtgccaggtggggcttgtgttgccagcttctaattggagattgccttcccactcagtgtgagtttctgtcaacagtgcagtgttgcccattagcatggaaagcaatgtcaagtcaataaagcaactgaataatcattattgtgtccttaaagcataaataaacagttaagattaaaaaaaagagccacaagaactctgaaattcaacagtattgggggtggggagtgtacacatgtatacttttccttttatttggagcttcataaacctttttttggtaagtttatgaatttagtgcaggtgtatcttaattatttgctcaacagacttaaagagtaaatcctcttggtgaagatagaatttcttaaaattgttcatattgtccttatgtgcgggagtgatgtggtttagctttttaagcctccagccatccctaagtagttggggtgaactgaggaggcgactcagaccttgtccattctcccagttccatgcaggaaaaggaggtgtgttcctccatggcattggtatgcttcaattcccttttgtggtt

SEQ ID NO: 36183 - DNA, 1620 bp, Mus musculus
ccccctcggaagaaaagggcacgggctgaccccactgtggagagcgaggaggcattcaagagtaggatggaggtgaaggtgaagatccctgaagaattaaaaccgtggctggtggaggactgggacttggttacgaggcagaagcagttgttccagctccctgctaaaaagaatgtcgatgccattcttgaggagtatgccaattgtaagaagtcgcagggaaatgttgataataaggagtacgcagttaatgaagttgtaggagggataaaagagtatttcaatgtgatgctgggcactcagctgctgtacaagtttgaaaggcctcagtatgctgagattctgctggctcaccctgatgcgccgatgtcgcagatctatggggcgccacacctcctgagattattcgtgagaattggggcaatgttggcctatacgccccttgatgagaaaagcctggcattattgctgggctatctgcatgatttccttaagtatctggcaaagaattctgcctctctgtttactgccagtgattacaaagtggcttctgctgactatcatcgcaaagccctgtgaaggtctactgaccgctcactattgtctggtatctgtaaacacttctgtttagtcctttcatggtataattgatgttctttaaaactgtcagtgtaaaacagggcttatgtttcagtttgttttcctgttctgttgtagacagaaaataaaaggagtgcccagctcctttcctcatttcaaagttgctaccagtgtatgcagtaattagacaaagaagaaattcagtagaccattttattgcctagttgacaacattgcttgaatgctggtggttctatccctttgacactacacagttttctaatatgtgttaatgctacgtgatgagatgccctggttcctagtgccaaaggttcaacttaatgtatatacctggaaacccatgcatttgtgctttttttttttttatggtgcttgacgtctgtaaacagcccatcctctgcaagtccatctttgttgttccttaggcattcattctatctttgctcaaattgttgaaggatggtgatttgtttcctggtttttgtatttgagtctaatgcacgttctaacatgatagaggcaatgcattattgtgtagccacagttttctgaaaagttgatattttaggaattgtatttcagatcttaaataaaacttgtttctaaatttcaaagcaaaaaaaaaaatgtgtggtgttctttttatgttcctgagactagcaaatacagggtcgaggtatttgggtggcacagaagaaaactggctttcaaaggaaaaattcctttcttggaccggagagactgctcagcctgttctgtttcagaggacccaagtttgtttctggtaactcacaagcacctgtaactccagctctaggggatctggtgccttctggccatctcaggtaattctgtggacatgtatatgccaccacacagacacatagttaaaagtcaaaagcttttttaaaagattcttgctgtagcagttaaggtcaagttattttccctctttggtgtggcttctctgggcagattgcttacacgtgacacttggag

SEQ ID NO: 36184 - DNA, 1174 bp, Mus musculus
actgtgttacattcccatccctcaacagcttcaaaagaaatgcttgttttacaatgtgttggtctcttaagaaaaatggttgtggttttccaaacccttgtgtaaacaggagccccatttgtacatgcttttgtccttagtaaattaaagctagaatagcaattctctcctcgggggagaggggctaccctggatatgtaacaggcgcatgttttatacatttgcacacatttaaagcaaatggaatcacactgttcctaagagctgtgcttagttcttcctgtcctgcctgtccattttaggctccctctctgttctacttacctatttacctaaggacattaaacagttttccgtgtcagtatatataggcctctgtttaattcatttgggtattctgtagtgtgcatgtataatttgtatcatcctccctactgaagcagctataaataagtgtatccagttcctcattgcaagtaccaattcaatgaactatccacattcccatgtggaagtgtttgtggagtactatgctagctgttcagctgtaacatgacattctataacaactaggaagaaatagttcctcgtgtatgaaatgaaagagactgagagtatacatacatatatgtcttcaactccatttggcaaatcaaaagctcttttactaatttccttcatatatctaaggcacatttacaatttttttcttacatgtttttgcaaaagttcatcttcattgcagatacctactttcctttctaggttgtattcccacttcatctttccagaccatcctaggaaatactaggaatccttggaagggaaagaaggaacattgtgtaagtcaaggggattgttgaatgagtcatgccatcatagcaggaagcttgttttttaattccttttcactgaccattatttctcttgaaactcaacctctttatcttctaaagtcacaatcttaactctccgatgaaagtctcaccattttacctgtggtctctttcttgctaactcctcaaatactttcttccctatcttttctggagttctatgtatgcaattctctctctttatttaaacgttcactggtttatagtgtatgcttcaagctacatgataataaatctccatttctctgtttgagtgcactctccagatataaaagtcc

SEQ ID NO: 36185 - DNA, 1116 bp, Mus musculus
tgcagtatagctgtaccgcactgtagtgcactattcacctcggcacccagctacaagacacagctacagaggctaggtactgagaaaacattccgagcgaggaacttagatccaactgtaattgctgtttttataaatcccattatttccccttttatccagtgaatctaaggaaattgtgtggaaatatttctcaggctagaagaaagtaattttatacagaagagaaaatatatctaataaagtaagctattcttggttctttttagttttaatatgtatctttttggcttgcacagcaaagattagtgccctaaaagaggcctaaatttggatattagatacttaagacaaactctgaatgacgagggagtgtcattggcttggggaggaacaacatgccattgaatatccctttgctctttctatggctattgaaaagagttgaatttgtttctacttacctaggagccaagtgctggaaggctagagaaggaagctgggagataatgcccagtgtaaaaggtggactatgaagacggaatagagtaataaatatggaagtgagacactcagggagaaaagattctggacatggggcagaacgctcaatggaagacagagaggtgagcagggttctgaaagtaaggccctgagaggatttgctggtattttgtaaattttctagttcttaagttactgtattgataatagcaaggattcttgtctatgcagtttgacagcctttgcctttgactggtgtgctcagagccaggggctaggctaaccctgcaggggtgctgagagtaaggctttcacctcttcctctaaactccttagaccagctgcgaaggcaaagggcatgtaaaaccatcgccatttcctgcactgccacaggagaagagcaagcaccatgcacgggagacaagtggtggaggaggtggtactaggagcaagatgagtagcactgtagtaactgtagtaatatttgttactgggacagcgacacaagtgttttaggtaggaaaggggctctggagtatttgaaaacctgttctttcctaggagtgcaaagttaaaaaacattaaaaatcaaactatgaatcgaagagtttg

SEQ ID NO: 36186 - DNA, 1104 bp, Mus musculus
acccttgtattttggcctccaaatgtttgcacatgaattggtatttctctccgccccctctctgtatgtctctgtatatgtgtttctgtctatctgaaaaagaacatagaaagtaaggtagtccagatgctgtccctgaaggtggtggtggtagtggtggtggtagtagtactagtcaccataagtagtagcagcagtgatactaatacctgcctaataaggcagtgggagttcttgtttatttaaccttgtccatatgacttgactatcaagcaggcttgactccccagaccttggtgcctttagaacccatttgagctcttgaatgtggtataagtgctaatatcatacaggaaacacaaagtcatgggcaggctttgtcttaataagatgaggccagaagcaaagtctttgtgtctctgtcactgcctgataattgttttacttgtagaactcacacccactcatcaacatctagccctagtgccagtcacagctactctagtatcttggccatttgaatggctataggccctgatcaaggcagcctctgttcataggttgaggttaaggggtggattctgggaggaggggaaaactgcagtgcagattcgagacttagggagatgggaccagtttctcactcaaagaacttgcctgttgtttccttctattgtatagggctcttctatctctccctttgtcagctggattcaagagacaagctgggaattgtgtggggtacaattggtctctttctaccatttctttctatgaaagcccttcctctcttccctttgatgagtttccagattcgcactgaatttccatcatggaactggttcttgaggtgtgcccagggcatgggaatggagggagggctgtagagcacttggctcctgcttaaagagacagcatcaggatcaggagagtcagtgggatgggccttaatctgagactcacaatagtactgttgatctccaactgagaacattgatgagaagagttctattacagattggttacacttggggggtggtaaagagatgaaaataaccagttctgaactgatgtctttgattatattttgaccacaggatttgg

SEQ ID NO: 36187 - DNA, 1147 bp, Mus musculus
acagatttattccatgtggccatattgggaagagacaggtatcctcgagtccatcttttgggtaaccccatgagctttaggtttaaatagtggaggactggggcaaggggcgggagatgtgtaattaaagcaggcctcctctgagtgtggcctagtttatcatatcacctcagtcccagccctgcagggtggtctgatgaagtccttattgctgtatgtaattgcttgagagagtcaatctggttcgctgatgttgattatttccctactagcatacagctgtactgtcatagagacttgccctcatctgaaggaccggctttctagtgagcttctgctgttcctacaatccatggtgactgtaggattaggacactgatttactctatgcctttagccataaaaagggatgaaagaatggacagcggcattccttgagtgatttacatgcatgcctatgtgcagaggtaaacaggtaacaggaaggaaaaggagacgaacacagaatgaaggcagaaatgccaggctttctcctcagacatagttctctttttagtttttatttctattattttgagacagggtttctccatgtcaccccaggatgtcctggaactcactctgtagagcatgttggccttgaactcatagagatccacttgcctcttgcttccagagtgctggaattaaaggtgtataccactgtacccagtttgtacatagttctttatttttaaacatgtcctttcaactttattcaaacaatatatttattatcaatatcccagaagtgtttaacatattccaaaaataaatttcatgtgatcaaaaggtgatgttcactttagtcctgtttgcctccatgccaccatgagccttcattccaggccacatagacaaacagggccagaaccacgtgaacagcaataattgcagcataaaaatagctgtctctattggacattccaacagcatcttcaaatataagatttcattgtaaaatagccagataggaactgtgatccttaaagctttaaagaacagaagtgtcttcaaggttgaagctaaagataaaattttttcatttctaaactctggaggctgcagcacgtttagggctgctttatcaaagagctccagggcatgg

SEQ ID NO: 36188 - DNA, 1139 bp, Mus musculus
aaggaactctggcaattcctgtaactggctgttaagaatgaggaagctgtacagcatagctcaaaatccaagctggctcactacaattaaatttccatttcttaaatactaaaatttgcttgcggctcactgcccaaatattgtttgaattgagcttattgatattttagcttaaaccagacaatggcaaattgcattttaatttgacattcattgccaaactcagaaaaaccagtgtgatcttttctgatgtcaatatgtagtaatttttctctattgtcagctttcttcaattacatcttggtggtgaatggaacttgtggaaatctgtgttcttttttgtggggatggatgggatggaaaggggaagaattgcttaattaatgaatatccgttttgactatgtcaatgtaaatgtggaattaccgtgtgccaatgacaggtacacacttaagttggctgaattgttcagaaggacagccatggcttgttctgtgcagttgcttgttcttaaattgaagctgatctcttgtgttcgtttacgttgagatttcaaggcttttggaaaatggggctgatagtgtctcttcctgtagtaggtgaatttaatttcctgttttcctgtttagattttaaaaaatacataaatctttgtgttggcaatttaatagtactgttaccaaaagaagttactaataatcacaaacacacatgaaacacctcatagatggttaagagttgcaaattgtgggactttctgctccccttcttttcaaaaagtagttctgtagaatcaatataaccaaagcaagtaggaagttgactggtttggaggatctacaagtagtcttagatactgtaaagtatcagattgtcaaccaggacttttttcctgtattcctgcgaaatgtattctgaattactgcacttttgtatatacgacagtcccctgtacattctctatttcctacagtgtatataaaacctggctggtttttctggaagctgtgtgaggggataacaatagttataatacaattggtttctatttttgagttcctttttgcacatgaaaatattttagcaggtatatctaaatgagtttgggtggttgtaacggaagctggctatgtgatgga

SEQ ID NO: 36189 - DNA, 1177 bp, Mus musculus
ggggaaaatgtttaaaacataagtgcatcaaataactatttagtagaaaataggacaggcttttttgccatacaatgggtatgtggtagaaataactctatacttatttgtggagcacccagaaagacacattaccagaaaggacctggtacagttcacctgcatctatggcccagaaaatagtttaaaaatagtaaagggagagaagggaaatgcaggactacctcaagctctatcccaggcttagtttgctatttgtaatttgagttgcatgtagttttattttctattatgacattcatggtccaatatcctaaacaatttttttcccctctgattgaaggtttggtttcagaacagaagggccaagtggagacgacttcggcgggcacaggcattcagaaacatggttccagtcgccatgagtccccctgtgggtgtctatcttgatgatcattatggccccatccctattgtggaggttatttggaagtgctacccaatggtgcctcgtcccatgcatcctcaaatgatgcctcttccacccaggccccctccaggattcagaatgcctccaccatttaggccacctcctctgccaccttttccctggccacctgtaccacctgatgcgcacatacccaatgcagcaagggaatataaccccttccccttccccttcccctttccctttcccttccccaacccattccccaaccccaaccctaaccccaaccccaaccccaaccccaaccccaaccccaaccaaaattttgcaggtcccagatacagatactgaagtctacatcagttttccaaaagtgtttttcaatcagatttatatcgtttgtaaacactatcacgcattacctgtcaagaagctgttaaacgaaatgtacaaagttaatgccttctttgttttgattttcaataaaagtttggattagcagcatattggctttgagagttataccaactttaagggtatagatgagatgtaaggggactgccccacctgggggttcatcctgtctgcagacaccaaaccccaaactttgttgccaagaggtgcttgctgacaggaacctggtgtagctgttccttggaaggttctcccagcaactgaccaatgcaggtgtggatgcttgcatataatcatcagactgagctcaggaac

SEQ ID NO: 36190 - DNA, 1214 bp, Mus musculus
ggtaagagcacccgactgctcttccgaaggtcaggagttcaaatcccagcaaccacatggtggctcacaaccatctgtaacgagatctgacgccctcttctggagtgtctgaggacagctacagtgtacttacatataacaaataaataaataaataaatcttaaaaaaaaatatatttttttaaaaaaactgtcttcccaataaaccagaggaaatcagaacttttccacccatcccgctcactaaatgggcctgagcagcctgttcctgtagcctgaaaaaggagggggttggaccaattagcatagtttcttttagattaattgcagccctgcctccagataccaaacatcaaggcatattttgggccttactcttccactaattacagcccttcaaaaatcggatttttatctattgcaattttgttttgttccaggtgacctggaactcctcctgtctctgcctcccaagtgctggcatttaaagcatgcactgccacacccagctacagtcctgtttcttagcacctgtcagagcggtcactctgtgaagcaaccaggacagatgtttctccccagccaaggtgaaaatacttgcagggtcaagtagaagccattggggcttgtgatagcgagaagtctgatactaatagtcttggctaaatatgcttgcataattgtctcaatgtatccctggaatatccaagagggctgttgagagcctaaaggaagcccagctggctgatttgactgtcagtcctttttgctcagacagccagggcagcaagggaaagtctcacagctcttaattagggatccaaattgctccattcccacaatatctttgtttgtttatggggaaattgatgccaagggtgcttacaaatatcaatgcaaagaactctcatgaatattaataaggagaatctttacagttgctaaagggcaaggacagtgagatgtcccagtgagtaaagagaaaggcattagaatgcaaacctgacaacctgagttccacccctaggactcacatggtggaaggaaagaaacagtacctgtaactcagctttctgaggaagagaagtgtctgtcatattttgcctgcctggcagtagctgttatggttctatgggctgtatagactagcctcaaagggtaactaactgcactgctgtatatgtcatctcaagatgtctaaatcacattcatag

SEQ ID NO: 36191 - DNA, 1135 bp, Mus musculus
ctattttgtttacgtaactaaatcaggtactcacatttcttaaaaattcattatccattcatacttttgaaactttgtcttctaatatctcattgttttatttgtaaattattacttaatctttttaaattcctattttcttctgaaaaataaaacatgataaaaattaaagctagaactttcaaatcaatcatagacctacaaccactgaacattctctatgtacccttattgtgtacatagaaaaatctatattattgctgtattttgcatgaaaatgccctccccctaggctcttatttttgaatatttagtcatcagagagtggcattcttgaattgtcttaggagatttggccttttggagtgggtgtggccttgttggaggaagcacgtcactagaggtgggctttgagatttcaaaagcccaaggccatgtcctgtgtctgtctttatttcctgatgcctgcagatctggatgtaagactttcaagctagtacttttccacagtgtcttcctgtgtgccaccttgctccctgatacctgatgataatggactaaacctctgaaagtataagcaagcccaattaaatgctttcctttatatgagtttctgtgatcatgacattttcacagcactggataagacacttggtcgcagatacagagtttttgagcttaatgagattcttcttttaatgtcattttattcctgacatgagattatttactatcttttattctttcattttcttgtttgtacatttggcctttacttcattcattgcataaattgcaaattaattttgttaggcatattttgaagtgtagacatatgaatgcctgctatcctattatatgtcatattttactaagttattatctacatgaatatgcagaggtataaataaagaacatataactcaaggtatttttgtacacagctggatgagaagggaaatatacccatggaatgacaggactgttccattctttaaaattcattcattatttgttcacgttacataccaattatcagatgcccctctcctcccagtaacctctcttgcaaatcctcccccattccttcctcctcacagctcccccacccccccatcacatcaagtctctgcaa

SEQ ID NO: 36192 - DNA, 1561 bp, Mus musculus
aagtttggagatcgcttataacatattgctatgtttctcatgttaaaagcctgtgtacggtttgttacaagttgtccctaagaaactatgcaaaacacgccgatctctgtaccaaataatcggctatgctgtaacactgtacactgtaagacagttccgttaccacaggagaatgaaaagaacccgggactcccaaagacgctagatgtgtgaagatcctgatcactcattgggtgtctgagttctgcgatattcatccctcagccaatgagcttactgttctcgtggggggtttgtgagccttgggtaggaagttttgcaagttccgcctacagctctagcttgtgaatttgtaccctttcacgtaaaaaagtagtccagagtttactacaccctccctcccccctcccacctcgtgctgtgctgagtttagaagtcttccttatagaagtcttccgtatagaactcttccggaggaaggagggaggaccccccccctttgctctcccagcatgcattgtgtcaacgccattgcactgagctggtcgaagaagtaagccgctagcttgcgactctactcttatcttaacttagctcggcttcctgctggtaccctttgtgccatgtctgataacaagaagccagacaaagcccacagtggctcaggtggtgacggtgatgggaataggtgcaatttattgcaccggtactccctggaagaaattctgccttatctagggtggctggtcttcgctgttgtcacaacaagttttctggcgctccagatgttcatagacgccctttatgaggagcagtatgaaagggatgtggcctggatagccaggcaaagcaagcgcatgtcctctgtcgatgaggatgaagacgatgaggatgatgaggatgactactacgacgacgaggacgacgacgacgatgccttctatgatgatgaggatgatgaggaagaagaattggagaacctgatggatgatgaatcagaagatgaggccgaagaagagatgagcgtggaaatgggtgccggagctgaggaaatgggtgctggcgctaactgtgcctgtgagtaacccgtggtctttactctagattcaggtggggtgcattctttactcttgcccacatctgtagtaaagaccacattttggttgggggtcattgctggagccattcctggctctcctgtccacgcctatccccgctcctcccatcccccagtccttgctccgctctcttcccttttcccaccttgcctctggagcttcagtccatcctgctctgctccctttcccctttgctctccttgctcccctccccctcggctcaacttttcgtgccttctgctctctgatccccaccctcttcaggcttccccatttgctcctctcccgaaaccctccccttcctgttccccttttcgcgccttttctttcctgctcccctccccctccctatttacctttcaccagctttgctctccctgctcccctcccccttttgcaccttttcttttcctgctcccctccccctcccctccctgtttacc

SEQ ID NO: 36193 - DNA, 1239 bp, Mus musculus
tgaaaatctcttaaaatttccttcatctttaattttccttaactttagtttttttcacttagaattcaattcaaattcttaattcaatcttaatttttagatttcttaaaatgtttttaaaaaaaaaatgcaaatctcatttttaagagatgaaagcagagtaactggggggcttagggaatctgtagggttgcggtatagcaatagggagttctggtctctgagaagcagtcagagagaatggaaaaccaggcccttgccagtaggttagtgaggttgatatgatcagattatggacactctccaaatcataaatactctaacagctaaggatctctgagggaaacacaacagggaaatattttagtttctccttgagaaacaatgacaagacataaaattggcaagaaagtcaggagtgtattctaataagtgttgcttatctcttattttcttctacagttgcaaagcccagaagaaagaaatggacagcggaagaagtggttgtttttttttccccttcattaattttctagtttttagtaatccagaaaatttgattttgttctaaagttcattatgcaaagatgtcaccaacagacttctgactgcatggtgaactttcatatgatacataggattacacttgtacctgttaaaaataaaagtttgacttgcatacactacagttgtttcacgttaacgtcaatccccatttttaaaaatctttttggtttcgcctcatctagaaaaagaaaagcacctagcttaccaggacactaaacaaaatgctgttgggtaagtgtgaaccagcaacagcagcagcagctggaaatttgctagaagtgtatattctcagactctactccagaccttttgagtccgagattcttaaggtggaccttcagtagagatttctaagtgctctgaatacttaaaccttggagcaccattggtttgcagcaacaggggggaaaggctatgtagagacagccttcattaacttggtaggtggtatgtttatggtttgaatatcagccaagggcaaagatgctgaggtttgttgcacagtgaggaggtgatggcggtggggtattttgggaaagatgttagtgcattgaggctgagtccttgaaggagttatcaaaaccctacctacttcttactcttttgcttcctgctgccataagccaagacagttcaatccatcacatcttccttccctggttgaagggcttg

SEQ ID NO: 36194 - DNA, 1167 bp, Mus musculus
ttttgtctacatgttatttatgtgcaccatgtacacacaataacctcagaggccagaagaggggattagatcccctggaactggggtgataggtggtgtaagctgcccaatgcaggtgctgagatcaagagccaccgtaagagcagtcagtagtcttaaccactgagccttgtctccagccccaataagagacaacaattaaggtcttattaagttctcaaatatagattgacttaaaagtcaagttgtatgaacatacaaggtgtgcttattgaaacacagcaaataaagtaggaagataaaattacagtagttcctaaattattaaattacagtccggctctctttccgttcccagcgcagccatggctcgtggtcccaagaaacacctgaagcgcgtagctgctccaaaacattggatgctggataagttgactggcgtgtttgctcctagtccatccactggtcctcacaagctgagggaatgcctgcctcccatcattttcctaaggaacagacttaagtatgccctgactggagatgaagtaaaaaagatttgcatgcagcgattcattaagattgatgggaaaatcaggactggtttcatctaccctgctgggtttatggatgtcatcagcattgacaagaccggagagaacttccgtctcatctatgacaccaagggtcgctttgctgttcatcgtattacaccggaggaggccaagtacaaattgtgcaaagtgagaaagatctttgtgggcacaaaaggaatcccgcatctagtgacccatgatgctcgtactactcggtaccctgatcccctcatcaaggtgaacgtcaccattcagattgatttggagacaggcaaagtaactgacttcatcaagttcgacacagggaacctgtgtatggtgactggaggtgctaacttgggaagaattggtgtaatcaccaacagagaaagacatcccggctcttttgatgtagttcatgtgaaagatgccaatggcaagagctttgccactcggctgtccaacatttttgttattggcaagggtaacaaatcatggatctctcttccacgaggaaaaggaatccgcctcaccattgctgaagagagacaagaggcttgcggccaaacagagcagtgggtgaaatgtctctagg

SEQ ID NO: 36195 - DNA, 1579 bp, Mus musculus
tatttcttagaaagtggcagccaggttcccagtgtttgatggcgtggtgctttcagacttctttctacatagtggagacagaattgttaagaaatgtaggcccattttgaagggacttcattttattctgttggctaatgacttcatgtcatctcttctcctcctgccccttcactccatcatacagggctttggccaggctcactcggctacgtgtccacgtcagctatctccttacttctgtcctccctcacttggagcttcgtgagatcgggtatgactcagaacaagtggatgggatcctgtacacagtgctggaagcaaatcacatactggactgagcaccaggctatatatcctctcgtagctttcttttctcccttgtgcctgtgtactgaatgtcctcccttgtcttgtttctcctttctccccttctcccttcctccccttctccccagaccccagcctctttctttctcttcacctttatgccttatatggagaatctttgaatgagtcctggctcttaatcggtgtgcttcacatttatggtgggtgtgaagaaagaggcccattcaacagcttttttttttttttaagagttcaggaacagaaaagcaatagtcaccaagttaggtgacctgaaagctttaattttgatgatctagtagatacttggcccgtttcatattcctgataatggtttgtattaatttaggtgaaaccagtcagcaaatgttgggtccaatgtgcttggtgggataagtaatgatttcagccctgccaaggttctagcaatctagttggaagcacaaggcacaccaagttaactaactatacagagaagggtatggtgtgtatgagtggtatccacatgacatggaagatagagtagagtggtttaaaggaaggcagtacaccataagtgggacctaaatgaagctttcaagagtgaacatgacggcactcttaatgatggttggtgcttaggtggtaggattatggttgatgattttttccttcctatcttcttgccctctttacactgcaatttttctctaacattcttgttgccctccttacattgccaaataaattgttttgaaagctaacaagtaggcttgaatttgggtgtcaaatgagacatttatgaaagtatgatgtaattttacatttataattaatgttgagtttaatattacctctggagagacagcataaacaaatgtgcccctccccccaatccagaatgtgaaaaatgtgtttggtaacaacaatagactagagtaaaggaaagctgccagccaccgcacaagtgttccatggtgtttttattgtcataaaagatatgtgaaaataaatatataaggatctaaatcttaaatttcaggtagcaggggaaatattttaggatagaaagatttagttgccatccctcgcaatattcctacatactttctaggctatacagagtgagagatagacctcagagtacagaagtcgtacatcttatgcacatgtaaagatgttttgtgaatccattgctttattatatttatatagtatattgtctcaaaga

SEQ ID NO: 36196 - DNA, 1196 bp, Mus musculus
tggtttaaaaagtgcatatatatgtagtaataaatggtaggcaagaaaagctagagtgttcataaattacatcagtggttgtataacaatgaacataccaagtgggtgaatgttgtggtatgtgaattaaatctcagtgaaactcaaaaacataggaacttggacattatccaaatgtccacctgtcaacatgagtgacttttaactgatggcacatccatttagttgggtattatgaagccattaaaacagtagactagatctatgaatatattgtgacctctactcatatccaagattttatattaagttataagctaagatacatgtatgtatgtatttatgtatgtttgtatgtatgtatgtaacacatttttaagcaaatagttcatgtgtatagtttgtagagataatttcaaaacaaatataggaataaaataggaaatgtatataacgggctgtaaaccttctgcaagtgactccgtacaagctaaaaacaaaacacctccaccttggaaacatttttaggtggtatgatttggagcgatttttacctttttcactactttttaattaaagtaatttttaaatattcttacaaacacttggcttccaaaatattagtcagacctactctgagggtttctgactttactcaggacaaacttgtattcatttgctatattgctcacgcgattaacacttcaatttctcctagagtttaaggggtgggacgtgaaggagccaccctggttacagcctcttgcacatgttaccctgggctacacttctcagccaggtttcccggaagggactgcttcctctcaggtgggcagccttacctcctccttgctagacctgcagaccacttaaaaatggagacaatctaatcgagggtacctttcaactggtgcagagatagagaaattggtgtatcccgacagcaagattctactcagcaataacaaactaaggaaccatatatgcaacaacttggatacatctgaaatgtattttgctaagtagaagaagccagactcaaacggctgcttactgttatatttcatttgtgttgttttctggaaaggatgaagcaataaggcagaaaaagcagtagacaccaagtatcggcacaagggatttctttttaataataggaactttctctgtgttatttatagttacaatgtgtatgt

SEQ ID NO: 36197 - DNA, 2159 bp, Mus musculus
ttaaatactgtatagtattgaaaaagattgtataaaattgacaatatcctgggtgttaaagataataatgaaacactatatatggcagaaaataccctgaggggtaagaccatgtgaaaacctttaattctcaggatacattacataggactgttcctaaagatcccaaaaatcctttaataattttgtagtcttcagtgtttagtcctagagataagactttttctaggagtgtttcctgtatacgaagttttaaaactaacccagtgttaaaatatttctttactgaactcaaactgtgttttgtcagaaccttcaacagtttcagtaggtagattcataagtttattaacttaatgattgcttccacactaagttttcagagtcctcaaaagcatatttattattatgacatcttttaaaccaaaatattggtagtctatgatactattgcattcaaaacaatatccattaaacatggagtatctgtctaatgtatgaactttcaagacaaatgaactagcatctatattaaagggacaggaaagaaagttctttagaggaaaggcagcctgcctcaaattccctagtgattcgtttatagttgttgaagaagaagaagaacctaaatggtttagacggtagaaccagctttggagtcagacctgtgaccctcaaagtcacccatgtttaccatcctgagcttagaaagtcactcactctgagcctcatttatctcatctataaaaagtaacattgcttctgacctccctgagtaagggttaaatgagattataatatccaaggtattatattatattatattatattataacaaggggaaaaatgaactttagggtactccactaagtacatcaaacaacatataataagaatttcattcaaaagcgagaaagaagcataaaatactacaaaaggtcgagtgaaatggctcagtgagtaaaggcatttgccaccaaacaggaagacctgagttcaaaccctcagacctgccaataataggacaaaaaggctgggaaataatgctatagtttctttaaaaatcctgtaaatccataggaacaaataaaacaaaagggaaataaggtggctaaattttactaggctgtaaacctaattctgcttcctagaagtaacagaattatattggtagttgtactgttctgttagccctacagtgtgttgaaagagttcgcatggctgaggaaagggaaacaaaaatgctagagataaagatccactttgtgtttaaaaggttggtgttttaagatgtgagaattttaatcacatattttcataactacagagccctcaaataacctgaaacaaggtagcaaacaaagtaaagaatgaaaggagaaacaggcacatctccaaactggtgggtactcagtgtctccttcctaatacaagtactgctgcacagttgataaacaaggaagtagccagtttcagcactggatgctggatagatctgaaagacagctctagaatatagctctactagaatatatatattttatcccatgtatatgaaacatctttaggctagatcatgaactgaaccacaaaacaggccttaataaatacaaatggactaaagtcttgtcaaacatgttctcttccacatggaagaaggttacacatcagtaccaataaatcgggaaactcacagataagtgaaaattagtgataacttaaagaccaagtcggtcaataaagaagcgggagagatggctcagtgcataagagtacttactgctcttgcagaggacctgagtttgatcctcagcatccacactgatggttcccagctacctttgtctatatatgggatatgcttagagataagcctattcaatgagaagaaagaccgtgtaacagtaattcacttcatatcttaagccataggaaaataatagcaaactacacctagaacaaacaaaaaggggaaaacatgcaaaatgcctgagaatagagtacaagagagaaaatgcaaggaatccaagcgagaaactggcaagccttttgctacatacagcaggaagaggtagaatgtaatcattagtttgagaaataaaggagggaatgttgctactgacctttgaaaaatagaaggtgtgtgagggagtactgtt

SEQ ID NO: 36198 - DNA, 1393 bp, Mus musculus
tcagttactacttaatttttgattggaataatttgtgcatgcatttatttttcatttaaatactgtgaagaaaagtatacttgtttttttgtttcagaacggaataaaatctggacacaccggtaataatgcttacccagagtcaagtaaccccattgcccaggcagttgctcactggtgttcattttgtgtgtataatctctgtcttacttagattctacatatgatcaccagtatgcaccaacttcttactgcagcttaattgtgggcagttgtttgccaaaatgaacgttacccagtctttactgggtttttgtggccattcacagaaattgctgggtcctataaagtctccagtggaatttactatctactctgagagaaaattttacctgttaagggcaatatgggcaatgaaaaccaagtgtaccataaatgacagcaagtgtctttcaggaattcacagaatgtaatacgttttttacagattagagatttaattggggcttttatttttcttatggtactagagatcaaaccatgtgccacactcttggataatatatccagcactgaattatgggtaaggtccagtgattcatttacttttgacaatatacagatacctcagtgcatttgtttttaaatcaagatctctctgtagcctatgctggcttggaacttacaacccgcctgcctcagtttttcaaatgccaccatccctacatgttctgttgattgctatcacttgttttgttttagcctatgatttagacctgtttggtgtagttttctgtctttaaagaaaaaagcccttttagctcttcatttcttgtatttcatccaagttgctgatatgatatcctaaaaatgaaaataaactgattaaaagattttaagtggctgaactgggtttttgttctccaggtcactcataaactcactgaagggttcatgttacagaaaaataaataaattttaaatgactattagtggtagtaagttttatgaatagaataaatactagaactgaatagattcactttgggtacaaatgtttccatgaaatagatagctacttcagtaagtttctgtcaatactcaaaattacacaatgtgaactggacctggtagcacaggcctataatctctgccacctggaaggctgacgtagaggggtcgcagattcaaagctggcctgaattcaactaaattaagaccttgtcacaaagaagaaaaaaaaatgtcagcctgcagttttgtgatagagtgctgtgctagcatgcacaagtttcaatctttcatactgaattggggagggtaatgagagagaataatgcagactattaaatcttgtagactcttaaaggtaaacatgacttttgagtagatt

SEQ ID NO: 36199 - DNA, 1164 bp, Mus musculus
cagcttctcggaaaatacagaattaaagtaggtttttttgactgacctcagaagtgtcttttttttttttcttaatacttccgttacctcagctttcattgaaagatgcagtaatggtttacttgagtatacacaggtataatggtacataattatattcttttctttactatttatttgtttagttggttgttttgagacagggtcataaactggcccagactgccctggagctcactgtctatcctaaactgccctcagcctactctgtcttaattataagtgcacaccatcaaaattgaatttagaagcatgcatggtggtgcttttggaggaagtggcaggagaatcagaagtctgagttcattctcgcttctatagtaaattgcaggccatcgtgaattactacatgagtcctttattgtccccacaaaaagaaaataagaataaatttgagttttgagaatagagtatctctggcagatcacttgcctagcatgtacaaaataatgaatgttattcccagtgacaggaaaatgaattttgagttgtagacttatgggcagttggaaaaaacgagaaaaaatatgtcttgctcagtgttttataactttctaattatattttttctcgaaattgtggtttccctgtaaagctatggtataatgtaacaataagtatatttacactgataaaagcctagagaggctgggtagcagtggcacactcctttgagcacagtgccagggaggcagaggcaggcagatcttggagtttgacaccagcctggtctacaaaacaagtctaggacagccagggcctctgttacaaagagaaaccctgtctgaagtaggaaaagaaaagagaaattgaagaaaacaaacaaaagtcaagatatataaagctccactattgacttattaattagcaaaagggtcttttctatttgctttgagatgatttgttttgttttgttttgttgtttttttttttttttttttttttttttttggtttttccagacagggtttctctgtagccctggctgtcctggaactcactttgtagaccaggctggcctcgaacgaactcagagatccgccgcctacctctgcctcccgagtgctgggatttgaggtgattacctctactttcttcctgctc

SEQ ID NO: 36200 - DNA, 1862 bp, Mus musculus
ggtatcagattccctggagctagagttaaaggtggttgtgagccacctgaccttgaactctagtcatctggaagagcagtcagtgagcgctcttaactgctgaaccatcctcttcacctgctctaggcatgaacttggcctgtacagaatcactcttttaatgatcaggtcagggtttgcatcttaactccttcctaagtgattatagtacaagggaggagttgagtgctagatccttcattaagtttgctttccaggctgctcatataggctacagctaagcccataaactctgctcttccatactaacctggtgcattttttttgcctttctaggtgattgacatctctatgatccttgcagaagccatcaggagaacccacaatggagaatctgtctcctacttgttcagccatgttcctttataacataacttctgaagcattttgaaaataaaccaaccccaccccttgtttttcttggtattggtgagttgagcagaagacccagcttgcttcagtatagctttttccatctcacattagctatattaccatttgtcctaaatgggagaaagacagattgctattagctgctaggatgttcaacctgcattgttgtatcctggctttcttgtttattttgtgaaccttgcagctttaagttgagctcagctcttgaaaggtgtatagactgttaagagagtattccacaaggtccttaggacgtgattggcaaagctcatactccattgcatgtgaacgctttggggttttcgtcattcagaataactagcaacaaagccagcccatgtgtaatacattttcagaggtctgcagcaagaaccctgagcatccttaaacatagttgagcatcctgtaaggcaggggcaggtagctcaatgcagtaattaggttttgggaggaagaagcctgatccattgctatttaactcttctctatctcgcttggattctctacacctattcctttccagttggctttacctttagctattgtgaccctttcctggccaaatatcttggactcagtgatcattgtaacaatatcttcggtaatacagacttgcttcttgctatgtaactgctaacattcacattaggtaacttgctgtagcacgaccttccttagcctactacctctgaggtggtgggtttaggtggtgtcgcagtgccttttgattaatttaagtatttaatttttatcttccttggatccgtttggcctctcaattgaacttactgtattgtgtagaagaaacttaataaaatgtctgtcatgtgtgcagttttgggtgtactgtcatatctgatttcccttctggcttgtgttaggtgtttcactggccagcacatctctctttcctaactattttagccaccttgttaagagaaagcaagacataaaagtatctgaggtttagtgagaattagaactaattaattctgtgtactatacatgaattatatcaaaaataattaattccttctgggtttctgccacttattcctggaaatccaaattcctatttcttttcagctgattttgtctaatgtggtaatttccctcctttaccagtgcttaatttctgaataaaatttgggattgtaagcacgtagaatttaagcataagatataatgcattgcaaaattttaagtgagtttctttgtatatgactgtataaggatatacagttttctttgagactcatagaatatagacctcggtggagagcgctcctttgttcttttaaaccttgatctacctttctgtggggagggttggttttctttggctttttgggggcgtttgatttttgacagggtttcctctgttctag

SEQ ID NO: 36201 - DNA, 1199 bp, Mus musculus
tgtgttttcttactatacttataattttggatctatagtagagtcgtctcttgaattatctgagatgcttttatcttctttacaaaaatataccagttgcttcattttcttgcctcaaccaaacatcaagaagtgtgatgtcagatttctcttctttgttcttgattttactggaaagagccttcgcgtgttgccatttagtatgatattcgttatttgtttttagcatcttcaagcaacttttgttgtttttttaatttagagttttcatttggtttggctgctgaattttgtttaaaaatttttagaatatgttattataattccatatgttggtaaatttttaaatgttgagtcattcttttattactggaatgatttttattcctctgttgttctgttagaattcattttgaaatgtatttagaattgaatttataatttagaaatgtattcagaagtgaaacaatcctatagtcttattattcttcattatctttttaggctttgggtattgtatagtataatttgatatcatactagatttgccagatgcatttgaggtttttttaatctttatctgtgatcttaaatgaattaaataatatgggactaatctgttctttcaagaaactatagaactcatcactacaactatatggacctggaaaagatctttaagtacccttccaatcttgagtaaagttattagtctcttcattttttaaaaaattatttttggcaaaattaggtaatacttaaatgatttttcaacggtgtgtcataagtttatatgtagtattctctagtaaatatgttagtatttatccagtagtgtgttgcaattggcttgccaattcaatgcgatttcttcccattttgggcttagtggctggctacacactggtgcttaaaattcaccatggtgggaattttataccataaaacaagtgctacaaattatgaccaactcttgcatgtttaccatcccactatgtatagttcttagtatatctcctttccattgttagtattgcctgcctgcctgcctgcctgcctgcctgcctccctccctccttccttctcttccttcttttcttcatttttgagacaagatctcagatgtagtaatggctagcctgtaattttctgtgtaaagtaggctggtcttcaacacaaagatatctatctgcctctgg

SEQ ID NO: 36202 - DNA, 2100 bp, Mus musculus
caaaaccaactgatccagccagctaaggactctgaaactccatcaccaaaataaatccttccttttactatttttctcagttatttggcacatcaataaaagtctaagcccctgccgccccagccgcatcaggtaaacctgttctgcgaggcggccgcgccggggcggctggcggcattggggcccgtggagcgcgtggcggccctgggcaacaccaccatgtactcaggagccagccccgttcttgcttctcctgctccgacaacatcacccatcccaggatacgccttcaaacctccaccttgactggacttcggcaccaccgggagaacaatcaaactacaggccaatttctttgaaatggacatcccccaaattgacatctatcactatgaattggacatcaaacctgagaaatgccctcggagagtgaacagggaaatagtggagtacatggtccagcactttaaacccccagatcttcagggaccggaagccagtgtttgatggaaggaagaatctgtacacagcaatgccccttccgatcggcagggacaaggtggtgctggaggtcacgctgccgggagaaggcaaagattgcatctttaaggtatccatcaagtgggtgtcgtgtgtgagcctgcatgcataacatgatgcactttcagggcagctgcccagcgtccagagacgctgcccaagacgatccaggccctggacgttgtcatgaggcacttgccatccatgaggtacatccctgttggccgttccttcttcactgcatctgaaggctgttccaaccctctgggtggggtcagagaagtatggtttggcttccatcagtctgtctgaccttctctttggaaaatgatgctgaatattgatgtatcggcaacagcgttttacaaggcacagccagtgatcgagtttgtgaagttttggattttaaaagtattgaagaacaacaaaaacctctgacagattcccaaagggtaaagtttaccaaagaaatcaaaggtctaaagatggagataacgcactgtggtcagatgaagaggaagtactgtatctgcaatgtgacctggcggcctgccagtcaccaaacgttcccactgcagcaggggagtgggcagacagtggagtgtacagtggcccagtacttcaaggacagacacaagctggttctgcgctacccccacctcccgtgtgtccaagtcacacaggagcagaaacacacctaccttcctttggagctctgtaacatagttgctggacagagatgtataaaaaaaaattaacaatcagacctcaaccatgatcagagcaactgccaggtcagcacctgatcgccaagaggagatcagcaaactgatgcgaagtgcaagtttcaatacagacccatatgttggtgaatttggaatcatggtgaaagatgagatgacagatgtgactgggtgggttctgcagccgccctccatcctctatgggggcaggaacaaagcaattgctacccctgtccagggtgtgtgggacataagaaacaagcagttccacgcgggcatcgagatcaaggtgtgggccatcgcctgcttcgcaccccagcgccagtgtacagaagtccatctcaagtccttcacagagcaactgaggaagatctcaagagatgctgggatgctgatccatggtcagccctccttctgtaaatacgcacatggtgcagacagtgtggagcccatgttccgacacctgaagaacacacacgctggcctccagcaggtggtggtcatcctgcctggcaaaactcccgtgtatgtgaaagtcaagcgtgtgggagacacagtgctggggatggccacacagtgcgtccagatgaagaatgtgcagaggaccacaccacagaccctatccaatctctgcttaaagatcagtgtcaaactgggaggcttcaacaacatcctactgccacagggcagtgttccagcaacctgttatctttctgggagccaatgtcacctacccaccagttggggatgggaagaaaccttcaattgctgccgtcatgggcagcatggacgcacaccccaaccgctactgtgtcac

SEQ ID NO: 36203 - DNA, 1445 bp, Mus musculus
tgttgaagcctcccagtttgacactgatctttaagcagagattggatagggtctgtggtgtggtcctctgcacattcttcatctggacgcactgtgtggccatccccagcactgtgtctcccacacgcttgactttcacatacacgggagttttgccaggcaggatgaccaccacctgctggaggccagcgtgtgtgttcttcaggtgtcggaacatgggctccacactgtctgcaccatgtgcgtatttacagaaggagggctgaccatggatcagcatcccagcatctcttgagatcttcctcagttgctctgtgaaggacttgagatggacttctgtacactggcgctggggtgcgaagcaggcgatggcccacaccttgatctcgatgcccgcgtggaactgcttgtttcttatgtcccacacaccctggacaggggtagcaattgctttgttcctgcccccatagaggatggagggcggctgcagaacccacccagtcacatctgtcatctcatctttcaccatgattccaaattcaccaacatatgggtctgtattgaaacttgcacttcgcatcagtttgctgatctcctcttggcgatcaggtgctgacctggcagttgctctgatcatggttgaggtctgattgttaatttttttttatacatctctgtccagcaactatgttacagagctccaaaggaaggtaggtgtgtttctgctcctgtgtgacttggacacacgggaggtgggggtagcgcagaaccagcttgtgtctgtccttgaagtactgggccactgtacactccactgtctgcccactcccctgctgcagtgggaacgtttggtgactggcaggccgccaggtcacattgcagatacagtacttcctcttcatctgaccacagtgcgttatctccatctttagacctttgatttctttggtaaactttaccctttgggaatctgtcagaggtttttgttgttcttcaatacttttaaaatccaaaacttcacaaactcgatcactggctgtgccttgtaaaacgctgttgccgatacatcaatattcagcatcattttccaaagagaaggtcagacagactgatggaagccaaaccatacttctctgaccccacccagagggttggaacagccttcagatgcagtgaagaaggaacggccaacagggatgtacctcatggatggcaagtgcctcatgacaacgtccagggcctggatcgtcttgggcagcgtctctggacgctgggcagctgccctgaaagtgcatcatgttatgcatgcaggctcacacacgacacccacttgatggataccttaaagatgcaatctttgccttctcccggcagcgtgacctccagcaccaccttgtccctgccgatcggaaggggcattgctgtgtacagattcttccttccat

SEQ ID NO: 36204 - DNA, 1150 bp, Mus musculus
aagcgagatcaatcttttcaattatttttctgcaagtcgcatgaattgttatagaggcaggacataaattgaaacattgctaaattctaaccctgagttattattacctgatgtatttggagtaaattaccattaatctctgttgaaagaggtagttgtgccttaggctagcatgtaagagccaatcatctattttaatcggaccaggattatgatttatgatctggtattgcatagctattctagttaactttaatttacaatctttctcatgccaattgagttcccttccatgattaaataactttccagtattagccctgtccagtgataagcattttggaatggaaactcgattctgtagaagtggtagtgactaattaatctttgctatcctcaattttagacacttagcctgtgatgaagagagagtggaagaggcaaaatttctggtgactcaaggagcaagtatttacattgagaataaagaagaaaagacacccctgcaagtggccaaagggggcctgggtttaatactcaagagactagcagaaagtgaagaggcttctatgtagtctgtgtgcggtctgtggtcctcagtgtccggaaagtgttggacacatgaagatgtttcctcaccttcgtaacttgataatgtgtggtgttgctcctactgaagtaccgggtctatgctttctacccactttccagggttgaaaaactggtcagcttgttctactgatgccattcattaaatcttgattactttggagtaagtggttgtggctgtcctgtcttgagcgtcttccatgcacctgctgacccaccgtggaccggaacaagttcagaaatagattccacttgggccaggttgttctagggagctttcctctgtgcagtcaaaccaaatcctgacctgttttttaagttcactcaagagacctatgccaaacagttcttttttttcaactacaaggttaatttatttttgttacaggaggaagttgtatattttagaggagcaggttttaagttgaattgtatgttcttaaaataatgaagaacaagagtttgtgtccatgtatctttttaactaactgttctcctctaaaataagacatatcatttttaaaaaaagaaataaaaagtg

SEQ ID NO: 36205 - DNA, 1107 bp, Mus musculus
gcgtggttggggtcccagagaggggcttctcaatctgcttgtctctggatcaggctgtaaacaaccctcggaaaatagctgttaatggtggtgataaattcctgcaaatcccagagccgcggtgacccctctgccaggagccctttctctttttccctacagctcacattttcccttccgatcgcagtttgctctagttccacccgcctctcactttgagctgtgcttcttagcagaaaatgtcagttatctctggaaacgcggcaaggacctgggtcctcagacctgctacacaccaggctgcacaccaggctgcacacgcctcctcgccctctccacccctgacaaaagccagggactccaaagactcgggaattacggcgatgccttcaaaattaacgctatctgtacacagagtgtatttctagtccacgaaaacacaggtttgctagatgtgatgtttctatttgattgatgacgactataaaagtacaaatttgggggcctgcgaagtatacagccatgttggaaaaagccggacttgattcttttctgaaaaccaatattgagctgtcaagatattccccccacatcccagggcagtactttgaactgtacccttaaggaattaacaaatagtaactttctttgtccttgaaggagaccgagaaactttatgaaaaagaaaagctcttatctagaacaaaggactgtatgaatatatacccttgaatatattttgcatcctttacttcaggaaggtctttgcttcatttcagtttacaaatgatatcacaaaaataatgaatctactgcctcccttcttggagaaagtgccggagtgtaaggtgtaagtgcaaccttctaaaaactgtcctcttctcttctctcctctcctctcctctcctctcctctcctctcctctcctctcctctcagtctctgccttgtctctggctctctcatctcagatagcgacaggttgagatgttattaaagtatcaaagaagcgactgcatttgaaaagagggatagaggaacgcatagcatttctctttcagagagagagaggaatgtcaatttacctttcctatcgtagatactgcaa

SEQ ID NO: 36206 - DNA, 3143 bp, Mus musculus
ttaggaaatcaaattaaattattaattcctcaaccaatgaaacaaagctagctgtaatccttagatttttttcttttgtttcccaagcactctgttgaggcatttgccattttcagtcctttgccaattctctcacaaccctaggctttctttcttgatacatacatacatacatacatacatacatgtaacatatataataattattattattactatccaagaccaataaatctcattcctgcctctttcatgttttctatatttacagttgtttagagaatgagcatatatatatacttgtttgttttgacttactgttttttccctcagagaaagaaaaaaacatgaagttggatagagagggatgtgggaaggatcttggagcagttgtgggaaaggaaagcatgtgatcaaaatataatgtatgaaaaaagccatctcttgagtcacccccatgcagcctaggcttgctgtgagagttggacgtggtctgggcccaccaccctgctctgtactactacttggttttcccgtcaagatgcctgaggaagtgcaccatggaaagaggtggagatctttgcctttcaggcagaaattgcccagctcatgtccctcatcatcaatactttctattgaaacaaggagattttcctccgagagttgatctctaatgcttcagatgccctggacaagatatagtataagagcctgatggactcttccaagttggacagcaggaaagagctgaaaattcacatcatccccaacccttaggagcacacgctgactttggtggacaccagcattggcatgacctcattaataacttgggaaccattgctaagtctggcacgaaggcattcatggaagctctccaggctggtgcagacatctccatgattggacagtttggtgtaggattctactcggcctatctagtggcagagaaagtggttgtgatcacacagaacaacgatgatgaacagtatgcctgggagtcgtctgctggtggacccttcaccgtccatgcagaccatcgtgagcccattggctcaaagtgatccttcacctcaaagaagatcagacagtacttagaggagaggagggtcaaggaagtggtgaagaaacattcgcagttcataggctatccaatcaccctctatttggagaaggagagggagaaggagatcagtgatgataaggcagaggaagagaaaggtgaaaaagaggaggaagataagcaggatgaggagaagcctaagattgaatatgtgggatctgatgaggaagatgacagtggcaaagacaagaaaaagaaaacaaagaagatcaaggagaagtacattgaccaggaggagctgaacaagagagcctatttggaccagaaatccagatgacatcactcaagaggagtatggtgaattctataagagcctcaacaatgattggaaggaccagttggcactcaaacacttctctgtagaaggtcaattggaattcagggcattgctcttcattccccagctagcgccctttgacatttttgagaagaagaacaacaacaacatcacattgtatgtccgctgtgtgttcatcatagacagctgtaatgagctgatatctgagtccctcaactttatctgtggtgtggttgtctctgaggacctgtgtctgaacatctccagagaattgctccagcagaacaagatcctgaaagtcacccacaaaaatactatgaagaagtgccttgagctcttctctgaattggctgaagacaaagagaactacaagaagttctatgaggctttctccaagaatttaaagcttggaattcatgaagattccactaactgtcactgcctctctgagctccttctctatcacacctctcagtctggagatgatatgactttcctgtcagagtatgtgtcttgcatgaaggagaccaagaagtccatctactatatcactggagagagcaaagagcaagtggccaacactgcctttgtggagcgtgtgaggaagtagggctttgaggtggtgtaaatgactaagcctagtgatgaggactgtgtgcagcagctcaaggagtttgatgggaagagtctggtctcggtgactaaggagggccgggagctaccagagcatgaggaagagaagaagaaaatagaggagagcaaggtaaagtttgagaatctctgcaagctcctgaaagagctcttggagaagaaggttgaaaaagtgacaatctccaataggcttgtatcttcaccctgctgcattgtgacaagcacctatagctggacagtcaacatggagcagatcatgaaggccctggcactgtgaaacaactctacgatgggctacatgatggccaaaaaacacctggtgttaaaccctgactaccccatcgtggaaaccctgcagcagaaggctgaggcagacaaaaacgacaaagctgccaagaacctggtggtgctgctgtttgaaactgctctgctctcttctggtttctcacttgaggatccccaaacccactccaactgcatctaccacatgattaaactaggcctgggcatcgatgaagatgaggtcactgcagaggagcccagtgctgctgttcctgatgagatccccccactggaaggtgatgagaatgcctcgagcatggaagaagtggattagagactcctggaggccctgccctctgtatagtacccctgtggctcccccagcagccctgactggcctaacccacctggctctctgctcatgtctacaagaaccttttatcctgtcctgtgccttaaggcaagaagatctcctcccacagaatagcagggttggatgttgtgtattgtgttttttgtttgctttattttgttctgaaattaaaagtatgcaaaataaattaaaaaaaagaaaaacaagccatttaataaaactacagctaataccaccgctaatggtaaaggtaatcatttttccctaacacaaggaaaaataaatgaaaatttgatatcatcattagaaaacatagacaagaaagtctgatcagtgcaatggaataagaataaaattataaaagctatccagaccaacataattttcttttggttcacagattccatgacatcaga

SEQ ID NO: 36207 - DNA, 1149 bp, Mus musculus
atggaattgaaataaactggaataaaattagtttaaattttggacttgagtttctgagaaacccgagaaacatgcagaccattctcattttcactattagtcaaattcagtatgtataattcatctccataaaaaagctagaactgaagatacagacttgtgattcattagcatataaagaacagtggggcatcttgtgggagcagccgcgccggaagttataagaattataagaatacaggaagtaagccgggcttggtggcacatgcctttaatcccagcactcgggaggcagaggcaggcggatttctgacttctaggccagcctggtctacagagtgggttccaggtcagccagggctatacagagaaaccctgtcccgaaaaaaaaaaaaaaaagaatacaggaagtgagcatcatcgccgacaaaaaaaaaaaaaaaaaaaaaaaaaaaaaagtgaagtaactaaggcgcacgcgcagtgacgttcagttgctcagctttggagaagtgagcggtaaccgttagtgggatagtgagagctgacggaggataaagatatgaaaaaatttcgaagtaactggtccaatggggaccaacattttggaaactcgggcagttcctgggtggagccacaaatcaactacaaatagtaagtttatagaaatattttgattcaaaaattagaagtccggcggtagccgctttgaaatcattggtttttttaaaaaatggcagtgatatttaaaaatgggaatgggtgggtagggaagtgggggacttttgggatagcattggaaatgtaattgaggaaaatacgtaataaaaaaaaaatggcagtgggaaccgggcggtcgtgggagccgggcagtcgtggcgcacgcctttaatcccagcactcaggaggcagaggcaggcagatttctgacttcgaggccagcctggtctacagagtgagttccaggacagccagggctatacagagaaacactgtctcgaaaaaaaacaaaaacaaaaaacaaaacaaaacaaaacaaaaaccaaaaaacaaaaacaaacaaaaaatggcagtggagtagtgaaacattacttgtacttaaatcctaggtagtcgctggttaatcacttttttaaatagactgataag

SEQ ID NO: 36208 - DNA, 1287 bp, Mus musculus
gactgcgcagagcactcctaacagcactgtgtggaagattgcaagtgattgcttccgttttcaagattgggctagtatttaaaggagcaaaaacccactctattggtccattagttccagcaagagaagttagaggagaattaatatatttcgtgcaaaagtactacaaacttaagtgtatgtgctaaaactaaatgtatgtaacattttttttttagcagcgcctttgctagatcagctgccagtttggattattgcccttaagagctttaaagatagttttttttacatgccttatgcatacattccactactgacactctcaaggtaatattaaacatgatctaggtactaagatattcactgtgaacccgatctattgcacaaatggagtccttttgtattactctctatgggatagcacaagatagctctgtaggatagtctcagttactagggtaatttctcaatgaagcacatgcctgtttacgattaacactaaagttttaatatataagtatttgaagtctgttcaacttagttttacgctagtgttctgacatattttaattgcatataactgtataatagtccgtgttgttttcttgcattgacatgtttccttttgaaatgaggtaatcaattaggtggggaaaaaaatgttctcgactgatacttgtatatcgggtgcatttaatggcagtcacaactctgaaaccttttgttcgtgccggcttcaggtcaatgtgtttatgtgataaatgggagtgataacagaagctttaatgggagagtaagaaatgagaaacatagaaatctaaggctgaagccaacaccaaaagagggagcacacctgttccctacctcctggaagtggagccaagtttcaggatttgcatcccaagagtctctaagaattcttgccatggtcctaaaaactggattttaagattattttacttccccttcatgcctgtctccagtatccaccccagcttctttctgaatgtaagggattaagatatcagctgtaaacttaactttgtctccgaatctgagaattcgaaagaaagctatgctcagtctctgtacatgctgaactccaaattcttccatatcaacttcaagccccaagcctccaatgtattacctaccatgcgcatgaataattttcttccatggcttttacactgtcaacggctttacctactttttaaaattaagtctttgattttatgatttatttctgtatggcactggataaaaatattattaaaacatttctgc

SEQ ID NO: 36209 - DNA, 1126 bp, Mus musculus
gaaatgatcttcatgataaacttcaaaggaacaaactttatgttttagcttctaaagacaaaaatatagtgtttttagcttttagttaaactttataattctttgcaatttttaagtattttaaactaaatatgcaaggtttgttctatattatgatcactattaatcttttatcactcaattttaaaactagtaatttactttggctcagaaatgtactatatttataattattgtattatttaaattaaatagaaggtgatagaactgatatttaaaaccatggctcatttaagttcttatcaaaacatatacattctagtctattcagagtgagcttgctcttattttgaattttttccattaactatatctttagcaaaaataattaaaatgcccagtcactgccctttctattggtggagaacaatcgcaaaatctgtgtataattagcaataacagaactaaaccattgtttagttgctaatcatatgttgctttatccatatgctgtatgactccataacatgtatgactttaaatggctggaactgctcatatgtggactaaactatttttgacatgttcatatttttataacttaagaaataaaataaaagctgcattttcacaagttttctcaagtctttcttaaggtttttttggttttgtatttaaggccccagagtgggaaccacttaattattagaattattttttaaatattttattggttaatttatttatttacattttaaaggttatcccctttcccagtttcctctccataaaccccttatcccatcccccttcacctgattctatgagggagctccctacccacccacccacccacccacttccatctcaccaccctagcattcctctacactggggcatccagccttcaaaggaccaagagtccctcctcccattgatgtccaacaaggtcatcctctgctacatatgcagctggggccatgggtccctccatgtgtactctttggttggtggtttagtccctgggaactctgggggtactgtttggttcatattgttgttcctcctatggggctgcaaaccccttcagctccttcagtccttcccctaacacctccattggggt

SEQ ID NO: 36210 - DNA, 2846 bp, Mus musculus
ttttttaaaagtagccttatatacccttgtttttatgaagagaagatactccatgctaaagtaaagaaattggacttggaatagatagaattgaagaaatttacagcttccagcgtctatgtcttcctagttcagaagtttctataataatgatgacaaaattatgtattaacactactcaaagcagaagcgccaccaggctttgaaatcctcttccaaccatttatcttgaagggaaaaaagatcagtcataatgtatggtatcagtatcttagaaggtattatcttaagatcataattgtcatataggtcagacatagagtcattgcaatattgtgaataattacagtgcctgaagttaagactaaaacaacacacacctaccaaaaatatctcataatgtaatgaagggaagctgagaactaaagccagcatctgtaattatttaaatgtcttaaaaggaatgttcactttttaaaagtgacctttctgtgtgtaatgtggttaaagactgagtgagaccaatgggaatgtgttagaaagtcaatcagaattcaacaagattcattgcctttctgttagaacgctggtggaatcctacgtattcaaaattaggatccttgtgtagcactgaacctgggaaagagatttagacttggaatttaaatttgataacagggcttggttttcaaatgtgcttgtattaaattacatttgtaatttatggtctgcttgctgttgctgattgattgttgatcagtagtgtgcatttcagagagcctttcattttgctttaatttcagcaaagcgggttatgatacatgacttcctcaaaatcttgttcaaacctacgggtgattaaatgtcttggatgagcctggggaagttaaagggaagaaaacactgttaccacttttcctgtttgtgaagagttttagaaactggaaatgctagatttgggagaagggcagagttacttgattaaggactgtctgtgaagtaacttggagtgtgagtttctttttgaatctttagctaaagtctggaattatatattcttgatagatattcgcacttggaccatagttactgtaaaaagcaaaaattcttaatactgttattctttgcactttttcataatcattttatacacacacacacacatacacatgtgtatgtgtgtatataatatatatatatatatgttgcttccattgcgttgtacagatgtgggccaccactacaacaaaatgagttctttgtgctctaaaatatttataaagaaattatttaaatgttatgtatatggtggtaataacgaaaaaaaatcatctggtgttataagcaacagcgaaggtttttgtaaaagtttcttttcagtgttctgcaaaataaaatttgaggcaagttttccctgaagttatatgtgagtattctcatgctaccatcttgcctttgaagcgtgaaaagacattaattatcaagtagactactattcagcttctacttcctcctagtgcactgtttatccttcaagggtgtttttttttttttttttttaaggcttttccaatatatgtatcccatttggaatggtgatcttaaaatgtgagtgcatgcatactatcttatttaagatacttgcaccccacccactcccatctcccgaagctggaacactgccaactaggtccttaagaatcacgcaattaacacaaggttgggtgctgctaattcttcatgaaaatccaaacacgttaagggaccagggagatgccactgcccccctgaattttcatcaaaaatagacacgtttatgtaaacagaactattttccatattcatagtgactttttaagtatttgagcctaaagattttgatctccatttttataactatttaaattgttcacaattattacatgttagccatcaaataaagctgtgcttactattgattataagtgtgtgcatttctaagttgaacactcatgatttttgctttaattacacgaaagggttttatttctttgatatttgtactcatttttttttaagtagactgaaggtatgattgtctgattttttagaaatgaaatacagatgaaagattcatagagtccaaagcgagggagaatcctgtttctttattcatagagactgactatatctttggctatattttcctggtagcatatgacaaatgtttctacagtgagaagctgagaacaggttaaaagattgtgtggcgtttgggaactggagagatacattttaattttgaatgtagttatacattttatattcatatttgtattttctgttaaaatgcacgattgtaggattgttccttagatttttgtgttgactcttgaaaagctttctttgttcttatttttaagtttgcacttgaatcttataaaaataaatccacccatgttatcaagccagtttgttttttcttatatgtcaatataaaaaaaagtctataaatttgaatgttacctaggctttttaagtagtgcggcttggatatctggaattaagtggttaacttatctttcataaattgtattcattacattggtttatttgaattcagaactattattttaatacagtgagttgaatatcttgtaacatggaaactgtgggacaaggcatagttagggtgtaattattggtaaattctaataattttaggctaatatttacacacatatatacatatatatacatatgtgtgtgttttcatctccatacacatacatatatgtatacatgtaaggtgtatggagatgaaaacacacacacacgcacacgcacacgcacacgcacgcgcacgc

SEQ ID NO: 36211 - DNA, 1165 bp, Mus musculus
catttcaatcaagcattgagcagaagtcctggctcgctgcgagcatgccaccagaaggtagttttttttttttttttttactggcagaaattgtagtactatgtatttcaaggcagatatgggctgaggtgctatggtcttgaattcaaatccttttagctatgtaaccctgggcagcttagtttgtgtttccacgtttgtgaaatgaaacgaccctgtatcaatatagcagggttgtggaaagattgagaaaccattggtaagtcactgactgtataggaagtgacacgttcatagtgttcattcagtgtggtttagctgtgatagtgatgaggagggtgacaacagccagtgactgccaccactgtcaccccaactaccatgaaggcaactgaaatgagagatgccttcctgattatcattgtgactgctgctgtctcaggcttggctgcctgatgggagggatttgatgctggatttagaattttaactaacaaagcttccccagaatctttgtgtcgggcatgcagtgggcagaaaccctggcttgcaggaagctagctcctggcgataatggttgtgggcattctgaaagtttccgtaggttaactagtcttttggaagaatgggggtcaggaggtggctctgatggttttccagagacctcttggcttacttattctttctttctgtcagtgggctgactccatggtgcaagctatcttgagattggtagtctaggaaaccagggaggagatgagcaggcgagagtggttttcggtgggtggggtagataaagacaggtgaatggatttcactttgacttttttcttaatatcttttgattgaggggcaggtgcttgttcacagagaatgaaccactcacagggcttagagaaaggcaagtttatttcttcctttttattttgttaccaagcttggggatagaacccgaggctttgtgcgtactgggtaagtttttaccactgatctacatccatacccaggcccagaaaagcagggttaaagcagaccagtatcttagctaatgggggaagcacagtgtagcagaaggcttgctgctcaggagatcagactcctgatgcttttgctaacataccagcagatagcacaaaaggatcctcagcagcagcagcagcagcag

SEQ ID NO: 36212 - DNA, 2665 bp, Mus musculus
aatgaacacttaggagtgacaatggactccaggcccaactggaaagcaagactgagcacagctaaatagctttcatccaggacagcgacccgtcacccactcagaaagcctagggcaaagaagcccctttatgaacaggcggggattggtcaatccctccttgtctagtcacccctagggagagatggctgaactggcagtagccagaggcagcctcgggatggcgaacgctcactctacctcccttgtccctgcaggtcaccgaagtgaatttgaacaacatgctgtgtccggccatctcagacccattctacggcccctggtatcgcatctgggcctcgggacaccagactctcatgaccatgacccacgggaagctggtcatcctgttctcatacatggctgggcccttgtgtaaatatctgctggatttgctccggcttccagccaagaaaatagactaaaggtgcttggggttttgtttttgttttagttctgtttgtttttttgttttgtttttgtttttgtttttgttttgttttgtttcttcctgaggaagcaaatccagacttgactcagaatactcagctcttgatgaaatcactggagagggcagatagagtgcttggtttatttcctttcccctcctctctggccctttcctccactactcttccttccccagctcctcccctcggatgactcttggtacccagggaaggtgctgggggctggagcttactccttttccttccctgggttctgggtcccttgtgtggcccaccccgtctgcgtggccttacccagggaaatggtagtcagcggccccttccatacggcttgtcggtgcttttgacaacagccagttgaggaaggggaggacaacgagcagtagttcttccagcatcccagcaatgaagtagtgttgggttcatttctccactgccagggacctccaggctcatgctgggatcccctttcatctccagcatagccccccaccagaaggggaccaaggccttgcttctataccagccgcaagcccagagccaagggacttcccagttcacagccaaaatagattctttcagtgactggtgtcccatgactgaaagcagggagtcacccagccactccttctaagggagctgcctggggcggatgatgatagcagtgtgcagccaacggacaagattctgtacaggggtgttagggatctgttgccacagtgaatctcaagggaagatgataaaggcgtacatagtaccaggctggacgaccccccaccacagaaaaccaaccaaccttccctatgaaagctgagattagatccacatctaaaatgagcatagaaattaagaactcaactaagtcaagtggcaacttgagaaagccacaatatgaatcacactctgcatcacatggataataggcagtgttctagtctcagctgacccggaaccatcctcattgtctgtgtatgtgcctgtctgtttttctgtctgaggcagcttcatggaagaacgagctgggcttggggcttgggtgctgtttggctgtttgtcttttggctgtttgaaatgggggaaccgtcacatttctcaaaggtactctcgagccattcctggcacttaggaggtgtgtctatggttcctggagggcgttttctgagggttagatttctcttgtgtagctcgactctgctgaagtcgacatcactggttttgaggcttgatagtgtccaaaacccatatgtaggttgaaagggaactctcagtggacctgaggcccataggttcaagtgttctgaagggaggcgctttggttggaaggtacttggttatatgtggaccacaaaggggaccagtgtctgtctatctgctgactccttgtcaacatctagtaggaagagatttgcttgggaatagaaatgtttgtaccatgagcaccccaacgtctcgtgccagatgcagtattcaatgtgagtttgtgggtattaggcctcagctgaacttcagcagctcagtggccatgtttctagacaatggactttcagggaaagtatctgcaggaaagcacacgggaactcagaggagccattgtgggacgggctgcctggccatgaggtgatcaagtctgaggtactgaaagcagggaagaactctaggcttgctgcccttgagctcctgtcctggcatcttcgccttctgctgtctgtgagggctatgctgagcttccctctctgactcttcaggtactgactcgccctgcccactcatagaagttggtggatgaatagcatgcagggaagcctccttggcctggggcttctctgtaaggaggcatcataggaggggagtccatgaggcccgaaacatggagctgctacctgcagcggtggagggcctcagcagaggggaccaactccagaatgtcatcgaggtgggagtgccacacatactcctttcccatctgaggcttcatggtccaggtcgccggtaatcttgggtttccctgcattggcctgcctttgctttggtgccagctcggtaggtattttctggtgctcagaggaagagtggaaatccaaagccaggatacctggcatggccaagccagagtcaaacatacgtgtcaggaaagaggaagtgaaggggacacgcag

SEQ ID NO: 36213 - DNA, 2015 bp, Mus musculus
gaagctgaatgaaacagattgtggctccttcaacagactccatagggaggctcagcctgggtgtgagatgttggggagcaggggacctgtgagatgttggggagcaggggacctcttcactgtctatatatcgtggtccaaacctacatggcaagaggtaacctgcctaggctcttagcactttgctgtgggagttgtccctaggtctgtccagagcctaccctctactgcctgtggtacagggatggagaagacagtatgccttgacttggcagctcctcctcgggcctgtcgttccctaccagcatgtgtgagctctgggcctgggcaagagtgctcagagaggtgcctatcaggaaggaacaaagtctcttcaagccctaattgtccgtggtcagggggctgcgccaataagtacagttggctaagccagtgtctctgcttagaggtccttcctgcccccagtatttggttttgtgtatataagacttggcccagcatcttctcagaagccttgcagcatggtcttctgtcatcctgtgacatgctgtgggattggagagccacctcctcctcctctttaagtctgtcttctgtctttctgtggacttctttgtacctgtgggggtggtctatggggtctatgtgcactttaatctatggtgcctctggtaggggtttgctatatgtgatcatatgggtgattcagtgtttcatgatgtaattacaagtttctcatggatagctcagtgtcaacagtggaactggggctgggtaatgtcctgagctgggtgtttaggagatggcaccgggccccttttaactctctgccaaatagacttccctgggaattctggcacctgtcctctttgggacaagggtttcttaatggtttctactgtaagggaggccagaagcagggggcgggggaggacaagacatcgcttctggttttttgtgagccaggaacaggtttctctggcaacttgggaagtccccagactaggaaggagcatcctgtctcctcctggtccagctgtccctgaggtaaaagtccattagaggagtcagtcttcctctggtatatgcagtgtgctcactgtgtgcaggaagaccaagtggcttgctgttgccctcgtctgtgacacttttgtacactgatttgccactcatggcactgagcagacatccatccctactcagtgaaaaaccagtcaaaagcaaaagtcctttgaagcagaagttgatgctttggaaaactcttgacttattttggtgtcaacattatgttagatttgaaagcattcttcgtgtatttgatgtaattgtagcgaagagagcaggattgaatggtgttcagttatttcttctgggacatggaaagcctgtcccccatccttcttctgaagccgagtctgctgtgtactgttaccctcgagggagcgcagggctcttctgagagccggtctctgaactgctgcttctgggacatgcttccccacctcctccagtctacctcccctcttggggtgtttttgtaatgtgctttctctgttttgtaaaatccctttgattgtaatgaagtgggttctgcagccaccttttggaaataaatggtccttaaattgtgtacttagcattttgaatcttagcctcaggtgtttctgctgttgaagattcctgaatgaaaagaaaccctccccatgggacttattgttacaatgttttcttcatttactgttattaaaagatttatgagaattcaggagtcctggccttgcttctcagaactctctcaagaaggctttgcagagtagacaaagagatcatttgttggctttgtgtatcataaagtagtcaactcccacccaagacagggcagctgggctctcaacacagcttggtcctgatggacagaacggtggcttggccttgacttcctgcacactgcctacttccaccaaggatcctggggaccatcaggccatttgctcgaatggggagcttttctgtca

SEQ ID NO: 36214 - DNA, 1902 bp, Mus musculus
tatatataggtatatagagatatatatatttgggaaatatataattttttcaaacaggaagtcattagaacaagtggtgagtgaaatgctgcagaatgtatattctacaactatgacataccgctaattattgaaatagtcaagcttatacatttaattgctgtgacaagtgacagactggtagttcagaaaatccttgtctagtttgtaattggctgaattcattgtccttgccatcagggcaaagtacacagcttcagtttttgagagttctttgaagtttggtatttcttcatccacagaatccattgttgacgtatccattttcagttatgatgccttaactaagaagctacttgctagcctgaaagacagtctcagtagccagttccattgaatacagagaaaacataagctgctgagctttagcatgggcttctaagtcccgttgtttctccttggacacactttgtgggtggattagtctttcagtatagaagcaagctgctacctgacattttcttgcccttatagggaaagtgagcacaagctgaatgatattgtctgctaggaaaagagagagcgagcgagagagagagacagagagagagagagacagaaagacagagacagagagagagaagaaaggaaaggggagaaagaaaagaaaaggaaagagaaacggaaaaaagagaagtaaagataacatagaaactgaagagagacagactagaccaatcttgttgtgaaatccatctactccatcatctcatcatttcagagctcctcagcccgggggagcgtacggctagttttttgttgttgttgttgtttttaaagaaaagatctatcacatacatatatgcgtgtatgtctccatatacttacacatgcatacatgcatatgtgtgtgtttatgtatttaacggtgctaatcaatcttgagcaggtcacgtgactggtcatgcggactctaaaatcatatcagattttttaaaaaatccttgatatatgcagatattatacagattttcttaccggtgtaataatgttctactgaagaataaccatcctgcaggcttcaaaggacgaggtcagcaatatttcccaccatggcttggggggaaaggatagttttgtctccttttgtattcaagttgatgcatagtgcatttttgtgtctaagtagctgttgactaaaagactttgtagtgtaaagggtgttatacaaactataatggtgtgcttcaaacaaaccaatgctaggccctttcactcttgttgtatatgacaaagttgttaaatatgtggtttgaaataactttgaacatgtggaaatatgtagcatgtgtctttaactcagacaaagattctaattgcacaagttgtgttctagccagttgtggtttatttgttcagaaacacaaatgtgaattgtactctttatcaccagaatattgtatgagttccgtgatctttaaacagctcagaagtaatacttgaacttcatttgaatagcacaaagtttacagagccccttttaaatgttaattagttccagttaagttttcctttaattttttcttttttttttttttttcttttttcaaatgcaactgggtattttcttggaaaacaatgtgtagtttatttttggtatgtagcaaaaggcttccaattctggaaggttttattgttcttaaacaaggtcagccaggtaccagattctaaaaagaacaattgccccccccctcaagtggccttctgattgcacgaatgtgctactcccctctccaatcccccctcccttgaggaggtcagtgaaagtgatggaggaagtgcaaggcttgctctcccctcccctcccctcccctcccccccacacctcacctaggatgtcca

SEQ ID NO: 36215 - DNA, 1186 bp, Mus musculus
atgcctctgattattacccttatttttcttatactgctgtgaatatagttagagattcttggatattcagctataccttatttttctgcctttctccctccccctctctctttctctctcccccccacagccttatctaaatgtgtgtgatgtttgcttttttgtgatgtttcttttatttagttttctcccgcttgctatttataacagattatgggacatgtaatattagaggacagacacaactataatttttatccctccctccttttcatagtacttagtattgaatgcagagcatccttacccctgtactataatttctgtttgcacagttgcataacatagctgtatgaagactcatccttctatcttatacaccttttgtctcccgtgacccttaacaacctaatttgtacataatattcccacagtttcagccatatacatgcttctgatttttctgtattttacatatatgagactctgcctactgtggcaaggagttacctgtttctggtttttaaaaattattcattttaaacttgtatatatgtacatgtctttctgtctctgtctgtctgtctgtctctctctctctttatgtgtatatatgtatgagtatcccagtgctgttagtagacttttcttggttctccaccttattcattgaggcaaaaactctccactgaacctgtagttccctaattatggctagtttagctggccagcttgctccaaggatcctctacctctgccttccaaagagctggaaattacaggtggcccaccacagacatctacatggtttgggggagggtgtccaagcaccagtccctatacttgctgggctgtccatctggactagtttttgttttcttttggacccagagtcttactctagcctaagctgacctggagttcactctgtaggcaggctcagcttcagattgatggtggtcctcctaccttaggctctcaagataaaatgatggacatgaactgccatgcttggctactttaattttttattgtagtaaaatcctaacaagatctttcctcttagcaaatattaaagagtacttattttctaattatacaggatagtggctccacctaaagcaactcatctttttcataggaattttggtaatactttaaaaattaaacttaccaacatatagca

SEQ ID NO: 36216 - DNA, 1231 bp, Mus musculus
ctagggtcctcacacttgtgagcaagtactttacacactgagccatcttcccagaattctctttttaaaatcttgagaagcttacagaaatagaaaggaaagtcgtttaacatttctttagtcaactcagtgcggtttgcacctgatcatgaattatacagaaacataagtgttgatctaccatacccctaggagtttcccgagaataccagacgtttcaaaaaactacatcagcaagaaagcaattcttctcttgccaggtgtccttatcagagtgacatcatctttaaaccctgtgtggcaatccctgatgcaatgccgtgatgcccagggaagacaggacaacctggaagtccagctacttccttaagatcattcaatttttggatgtttacccaaaatgcttccttgtgggagtggacaatgtgggctccaggcagatgcagcaaatccccatgtccctccgagggaaggctgtggtgctgatgggcaagagcaccatgatgcgcaaggccatcaggggccacctggagaacaacccggctctggagaaactgctgcctcacatccgggggaacgtgggcatcgtgttcaccaaggaggacctcactgagattcgggacatgctgctggccaacaaggtgtgagctgctgcttgagctggtgccattgccccatgtgaggtcatcgtgccagctcagaacactggactggggcctgagaagtcctctttctactaagctttaggcaccaccactaaaatctccagaggcactattgaagctgattaaacactggagacaaggtgggattataacctggaagtgctggacatgacagagcagaccctgcactctcgcttcctagggtgtccgcaatgtatgcagcatctgtctgcacattgggtacccgactgctgccccagtgctacactccatcatcgacggatacaagcaggtcctggctttgtctgtagagactaagtacacatccccacttgccgaaaaggtcaaggccttcctggctgatccatctgcgtttgcgactgccgccaccactactgctcctgctgcctctgcagacccagccaaggctgaagctaaggaagagtctgcggaatcagagaggatgtgtcactttgactaatccccgctaagtagccgagtcagccagcttcgtttgagaaaggtgaaaataaagggttacgtctctttaaaaaaagaatgcaatt

SEQ ID NO: 36217 - DNA, 1184 bp, Mus musculus
gccaaggatgaggaccagctgggggcagctgagccggccaagaaagtagaagacctgatgaagaagctatggggagactggtactttgactgggccaatggcaaattcagcaagtcagccaacagcctagacaggaagaaacttccctgtatgtaccctctgccagcttatcctagactccgtcttcaaggtgttcgaagccatcatgaacttcaggaaggagggagacagccaagctgatcaaaaagctggacagcgaggacaaggacaaggaggctgtggtgcaccactgactgcccgaggggatgccctgccgcagatgatcaccatccacttgctgtcccctgtcactgcacagaaataccattgtgagctgctgtacgaggggccacctgacgatgaggccaccatgggtattaggagctgtgaccccaaaggcccccttatgatgtacatttgcaagatggtgccaacctctgaaaaggtcactttttttggtagagtgttctctggggtggtgtccacgggcctgaaggtccagatcatgggctccaactacacacctgggaagaaagaggacctataacccgaaacctatccagagaaccattctgatgatgggccgctaggtggagccgaatgaggatgtgccctgtggaaacattgtggggctggtcggagtggaccagttccttgtgaagacagggactatcattaccttttaaaaaaaagatttatttatttattatatgtaagtacactgtagctgtcttcagacactccataagagggcatcacatttagttacagatggttgtgagccaccatgtggttgctgggatttgaactctggaccttcggaagagcagttggcgctcttaaccactgagccatctcgccagcccctatcattacctttgagcatgctcacaataaacacgtgatgaagttcagcatctgccctgttgtgcagtgcatcactgagtagtctggagagcacatcattgctggagccagtaagctgcatcttagagatctgcctcaaggacctggaggaggactgtgcctgcatcttcataaagaaatctgacccttcatgtcctactgggagactatcagtgaggagtccaactttctgtgtctgtcaaagtcccccaacaagcacaaccgtctgtacctgaaga

SEQ ID NO: 36218 - DNA, 1232 bp, Mus musculus
aatttcaaaaaagcaaaaactgggcagtggtggtgaatgcctttaattctaacctttgggagccagaagcaggtgtatcttgagttcagggccatccttttctacccagagaaactctgtctttaaaatccaaaacaaaactccaaaacaagaaattgtaaaaaaatgttaagactcaagtattagatgtttttgaataataaatgctaacaatgtaacattttggtgagaaaaatcagcatttttaggatcataatctcaagagacagcatttttgtattaagcagaaaaaaatgggtttactttgtagaagctaatttgaaaaagatcaaagtaattgatagagtaaccatgcttatcctgaagaataaaatagatatgttcatcttttgaacttgtgatccttcaagtcctgggattacaggcacatgccaccattcctggtaatatttgttcctgtaaaatagacaagggctggggaaattgtttagtgagtaaagtacttgtataagtgtgagagcctgagtttgcatcttcagcataaactttaggcatggcagtgtgtatttaaatccttgtgcctatgatgatattggaagatgtagatagaattccctggaagacattggactaagcagcctagtattcacaacagtgaatggtaaaaatacctgttaccaagcaaggtaaaaagtaaggatatagctcactataggatccatggctatattcacatgagtacatggagatatataggtagaatgtgataatcttaacaatgtcttaaatgatagcgaataaatctaaaaatataatagtgtgacttggctgttacttttttatatttttaattttttgtatgtgtggacatgtgatatggaagtcagaagacaactgggaccatttctctccttcagccatgttcctgggatcaaatgtgggtctctaggcttggtaccaggatgtttgctgttgatccatttcactgcccccttttttctggatagaggtagtagggcttgaacctaggaccttgcacatgctaagtatgcactctaccactgagctatatcctctgttcacttagttttcagagttgccatctgggcccccctatcctaggtctctgggactttgtagaggtaattcccacccccagcagctgcatatttccattcattctggccctctgggcctctactgtttcctcccatacctgctcctaccaccct

SEQ ID NO: 36219 - DNA, 2125 bp, Mus musculus
gaaagactccagaggtgacagtttgcttatgaaaacagccttttgccttgaatcctgcatttttttaactatacaataattgtaagcttttggattttttttaaagttacagcttttagttgcttttagttactttttaaaagtacttttaaaaattatttaatgtatatgagttctctgttctcatgcataccagaagagggcattggatcctgttacaggtggttgtgacccaccatgtggttgctgggaattatgggtcctctggaagagcagtcagtgctcttaactgctgaaccatctctccatcccttaaaattgctttctattacatagaaatgtaatctaagatttggtccatagattttatttatttattgattgatttatttattatatgtgtgtacgctgtagctgtcttcagacacttcagaagagggcatcagatttttgttatggatggttgtgagccaccatgtggttgctgggatttgaactcaggacctttggaagagcagacagtgctcttaactgctgagccttctcaccagcctctggaccatagatcttaaaaaaaaaatcccattttactacgttaactgtaacatatactttacatatacatttctgatatatctcttgtgcatatatcctaatatgcaattttataacaattttgcaaacatcaaaagttagttttagttatagttatattattttatgtattttgtgtgttttatagtatactcaagttcttttgaacttgaatatcatttataggcctaaatggtgaaacttagaattaatatatatatattttttttttgttttgttttgttttgttttgttttgttttttttcgagacagggtttctcagtgtagccctggctgtcctggaactcactctgtagaccaggctggcttcaaactcagaaatccgcctgcctctgcctcccaagtgctgggattaaaggcgtgcaccaccactccgacagaattaatatttttgattacaagtatttatacattttagagtatgtcatattgacctgcatgcaatgtgcaatgatttaaatcaagctaatttatcctttcttttacctattatttttatggtgaaatatgtgaaatgtatggtgataattaagtgtatgttatcaactgctcatcctgatgtttactatatctcaaacatgccttttaacaaagataacattttgtgccatttaattgacttcctattctccattaactattctgggtgcaaactctggtaattattgtctctacgatttcaacttttttagactccaaatatgtcatacatttgtgcctactctatttcacttatactaatactcaagattcgaaaacatttgttcaagttgccagaaatgatagggtttctgcgtttaaaagattgaatagtgttgtattgtattacactatattttcttatttattcaaataccgatggtcatttagatttgtgtgtgtctttgtgggtgtgggtgtgatgctggagattgaacccagggcctttgcttgtatctccagccctagattttgtttggcaggagccatttattgtttactattatttgcatttatattatattatttcctatatgtccctttaattttgtttgatagatattttattacgtacatgttatttacattacattttattttctcaaggtttcttttctctttttgatttactcagtagacttttggtgtctagaaatttatttttggttatccatttttggcatggtaatttttcacctgactttctatctttatttgttttttctgacagggtctcaggtaccctaggctggcctttaacttgatttgccactgaagatgaccttaaactacttattcttttgcctttactgcataaaaggcatgtggcactatgtccagtttatgtggtactagagtctgaacccagggcttcatttcatttatgctattcacacagtaccaattgacagctatccccagctctcattgttttattaatttctgttttttctgtgaagaaatttatgactaaagttgtgtctttgggaggatatatacctcctgttttaacataaaagttttaagaga

SEQ ID NO: 36220 - DNA, 1174 bp, Mus musculus
aaaaaaaagaaaaaaaagaaaaaatttatttattttgtgtatgtgagtacactgtagttatacagatggttgtgagcctttatgtggttgttgggaatttaattttagaacctctgcttgctcggtcggccctgtatgctccggtcaactctgctcacccaatccctgttcactctggtccaaagatttatttatttatatatatatatatttttattgactgtctgggtgaactgttatacccagatgattaattgtggtcaataatacaaaaaaaatgaaattctgggctggtgaaatggctcaactgttaagagtactgactgcccttctgaaggtcctgagttcaaatcccagcaaccacatggtggctcacaaccacctgtaacaagatctgatgccctcttctggtgtgtctgacgacagctacagtgtactttcatataataataaataaatatttttaaaatttcaaaaaactggcccaagaggtttaggacagtgatagaacatatgtctagtatgatcaaggtccttgttttgatgttgagtcggaggtgaactacaaaaaaaccaacccccaaaaccttaaaaccaaatccaaatggctgaaaaacatattaaaaggttcttagtgttatgccccccacccccaactgcaaatcaaaacagtggaatagcacattcgaattactagaattgcttaaatcaaaaggtagaatataatttgattctccctctaatgataatagcataaccgccgggcatggtggcacacgcctttaatcccagcactcgggaggcagaggcaggcagatttctgagttctaggccagcctggtgtacagagtgagttccaggacagccagggctatacagagaaaccctgtcttgaaaaaacaaaataataaagaaaaaaaagcataatttggcagcatttgggacacagaggcaagtagatggatctctgagttcgaggccagcctggttcacaaaaggagtttcaggacagtcagacttacatagagaacccctgtcaaaaaacaagagtataatttagtaatatttagtgaaaccattaggagattttcagatttttatcattctaaaaagattgtgttagattgttgccaatgactgcaccacagccccctgtaactactaatctgctttc

SEQ ID NO: 36221 - DNA, 1099 bp, Mus musculus
tggcattgaaatgcaaagctatgttccccagcagcctaactctagtattttgtgcttagagataacagtggagcttttgttaaactatgaattctgatgctgtacctttgtgctgaggcttcagatttctgcattttaaacaaacttgtaaattaagggtgtagcttccctgaccatattttgactaacaaaagatgtgtaaaacaccctgttaaaagcctgctcttccatcccctcaggtaaagtttatgctttgtttataccagcctgtcttttttttttttggaaaactagtagggcccaaggacacctatgggtgtgttagataaattcattatcttcaatgtcacttactacagtaaggtagtttcagggtcaaaatttgccctattttaagttactcccattaatgcatgatagttcataagttatctcagctgacaaaatgagccagttcaagtcaaattattggtggcagctctagagctagttctcagacctcacaggagggggttagtgaagtggagattgaaagtgggtagagagggagagtttgagcaagccagtgccagagggggaggggaggggaagggaagagaaaaggattgcactgtgtagacagagatggggggtggtgcagaaagaggaaaagagacttgctcagagagttgtggagaaatgggaagtgagacaaaagttctagattatatagtgaagagcaactgggtgagagggaaactcagccactgggttgttaagttcagcatggagggcagggtatgccagccatcctctgtaacaggttaaggtctgagggatgcagggagaacctgcaggccaggttctctttggtatgttaaaaacatttgtcttgggtctgaaatccaagagaagtatattatcatctcaaatgaaaggaaaaatctcttgtgagatggtgataagtgtagaatataattggattgccataatgctatgatttggctaagtcaagtttgttttgtttttgaagtatgtggagggatcttttgagaaatatctggaacggttgggagatcccaaggtaagttcaaatatcatcttcatagttgtttgaaat

SEQ ID NO: 36222 - DNA, 1171 bp, Mus musculus
taggagggagttgaccacatatcaacttaaattatagattttaaatatttttgaagaagcaggaagacatctcaaaagcaactagaggtcttcactataatttttcagagaaaaaaaaaacgttgtcagtaattagagggttgaaatactgagtattgaaatacccatcaacatagaaatgaacttttcttttgcccttccaactggaagctcaaggatatccttgaaaactagataaatttctacctcatactcacatactttgatctgttcctaaggaaagtgacagttttaaggcatgttgagggcaaaggtacaggaccctttacatgggttatgaagcttatttactatgtattttctgaaagttatgacagatatgaacatgaagcaacgaaagaagatgttcaagaaatttcgagggaaagagatttatatgaccatggcttatagcaggggagatccccttgttccatccaggattcagcacagcatgcattatggtcatgaccctctactatactactcacagacagctggccatattctgtctagtcaacatttttaccctcaacattcatctcaaagacaaggtcggggatatgggatgcccaggtaagagtgaactgattttcattataatgtatgtcttgtctttgtgtctttgttttttgtttttgttttctgagacagggtttctctgtatagccctggccgtcctggaactcactctgtagaccaggctgggcttgaactcggaaatccacctgcctctgcctcccaagtgttgggattaaaggcgtgcgccaccactgcccggcttttctttaggtttttagaaacaattcctgaactgagttatagtagaattgataactacaacttttatagtagagaacgtagtgctgatgcactcttaccctttctgtccactggcatatttggattttcattgtctagagacatgtgaagaatggaagagatgctcaaagatagaatgccatctgaaatgaatattaatataaaatatctttgtatccattaatactgtataggcccaatactagtcaaagtctttcttgttgaatgttttcaaaaaactttgttaattctacttaactattaagattggcaagaattgaataattgttttttttttctttcttttggt

SEQ ID NO: 36223 - DNA, 1173 bp, Mus musculus
aactcaaagatctgatgcttttctggcctttgagggcactaggtatgcctgtagtgcacagacacaaatgtaggcagatatttctggttttgggtacttgatcttattttcttggtactttccattaaactagggtcttgtgcatgctagtccagcacttagtactaagctacccctagctgtcttttcacatttattcttcagtggagtctcactatattgcctaggctggccctgagcttactctgtagcccaggcaggctttgaatttgagatctttctgccttgcctatttaggtagctgatattaccatattgttctgccagatccaaaaacctagtatgatttgttttgtgtattaacttaaataagggaagcaacttcgttggaaaagctatgtttacagaaacatccaacattagtagatactctgataatcaaaatatttttctaaaactataaaagtagacatttctaaatatatagcacaactccaagggagttatgtaagtttttaaaattggttatgtagtttaatatgacctttaataagtttcacttttctttttttttttttttttggttccttttttgttgttgttttgagacagggtttctctgtgtagccctggctgtcctggaactcattttgtagaccaggctggcctcaaactcagaaatccgcctgcctctgcctcccgagtgctgggattaaaggtgtgcaccaccactgcctggctttttgtttgtttgttttttcgagacagggtttctctgtgtagctctggctgtcctggaactcactctgtagaccaggctgacctcgaactcagaaattcgcctgcctctgcccaggattaaaggcgtgcgccaccatgccaggcaagtttcactttctgttgtccagttctgtgaacttttcgcagtgtgtgttatctaagcaacactacaatcaaaataggattgtttcttcatctgtcccatcccccaaaaggaaaacctgtttatgaatttgtttttgctttggtgtcatctgtagatatatctcctatgactattagcatgtaattgtatataaggtatatatgaatgtattattagcattgctagtgaatgaaggcaaagtacattcattcttgataaatttccagagcaacaaactcagcctgtgg

SEQ ID NO: 36224 - DNA, 1110 bp, Mus musculus
tgtgttactataaaagagttaaaaagaaaggggactgggttctaaacagcacaacttcatatatattaggttagacttcatatttatataaacagcctttcagtattacatactcagaatgaatggatttattgtttacttaattgcttagagaaatttctgtattttaaatgaaattaatcagacctagttcaaggatatttaaataactttttaaagcaccaactttggattcttgccaaattgttctctgagtttgagagatgtttgaggtattagtatacatcttctgataccatttgagagatgtaggtattagcatacatcttctgatactgttgataggtgttttgctttatggaactgagatcattcttcccttcaatatataatatagcctttaaccagatagcatatttcctgaaaaggaatgatgcagatgaatattttccaagagactactggtctcttgggaatggcttaagtagttggtagtaccttgcaataatttccctgaaccttagacctgagcagaaaactttcttctccatataagacacatttaaattaagagtagtgaggtagatatttattctttgatattatatctctttaagtgtgttctaagagtatttacttgtcctttcagttattattctcggttggaaacttagttatataatccacgagtataaaatccacaagaacaccaactgctagtattcacaggaatagtaggagattaatagatggcttaatgcttttttactttgttatataaaaactaatagtgtgcattatagtatatttatatagtataaaatatggatcatattatgaaatttataaccatttatctcaacatgagtagcttttttgtctttattttttttaatttatgtatatgagtactctgtacatctgcatgccagtaaaggacattggatcctgttatagatggttgtgactttaaatatttgataaaaagcttgtagtattttgccatggagacataacaatgttcacagctctatatttttgaatacataagtttctagtagtttttactttaaaaatgatgctatttgtaaaaattaatattacaattga

SEQ ID NO: 36225 - DNA, 1558 bp, Mus musculus
accattgagcagccttgctggcatgccctgatgtcttttttataattagtgatacatttactttttcttgtaagaatattcattgacatttagtgaaattttataatagagtatatatactatatctgttcttcatttcagatacttttcccattgctgatgctgtacctctccctcatggagcagtctactatccagtaatgacagatccctatgggtctcctttgttgggatttgattcctatgttcctgttgcatcagattattccagtattgctatgtggcatccagttaatgcagcatgtggtgcttctgcgcagatccatggtgctatgaatcccgggccaattggctatatgcttctacctaactcacctcattatacacctcagaattaagatttagcaatatgaaatacttttttgctgccatctttgctgttatggttcctaaatgttttacattagttcttaagtggtttagttgggaagaatgttaactgtctttaaaattattttacttttgaagtaaaatatttctttaaaacaaagacatattactttttgttatgaataagaaaattgcaatgaatgtacaactcgtccctctaatgggcaagttcattggagccagcttcctggtagccagcatgttaaaactgtattaactgatggtgccaactgagaaaagaaaggaacaaatacaagctattttcctatactatacatcttaattatttaaaaagttagtatgatttccatttttcaagacatttaaagagacaaaaaaatccaaacaggagcctgtgctcctgggtatttgtttatattacatgagagttcttcagatttcttttaagagtcgtcagaactgaattgtagcctgatattaaccagttttgaaggcacatggtgttctgctttgcatttgctaccatatggtattgtttaatactggatttacataactgtcctaccgcacagtattatagtatcttttgcacaatttgcagtaaataaaagctagcatgtaaaattgccaaaatgagtggagttttctttttgcaacaaagcaaataccagatgtttgattgcttcaacatgttttccctgacagtggttacaaaagaatgaatttctaccttgaattggtgatgagtagttgtaaggccacttgacatgctatttgatttcaccccattgcggttcgtacctagtacgtcttgttcttttctcctgagaatattcctattcacgttgtgttttagtgtttttaatttttttttaattaaaaaagttacttcggttagcctggttaagtattgagtttctttatggcactttcaaacactttcaaattaacattttgttagtcctcataatttgcttctttgttttctgtcctctcctacctctggccccgtgtacactcccacctcaagagtgtgtctttcctcatggcacatacattcttttgtctttcttcccttcctaacactgctgctatttttaaagcacagccaaggtttattgaaggtattttaaaacagattttaaac

SEQ ID NO: 36226 - DNA, 1160 bp, Mus musculus
aaagcaaagcaaaggggttaaagcacccgaccgcacctctgctcattaggggcaggaccccttcagttgcttttgagatggatttagtatttatagatataaaaaggcaaatgataatgacagtgaaacaaaacatgaagaatgtggctagaaaagactgaaagtaataggagtttcactccttggtgtgtgtgtgtgtgtgtgtgtgtgtgtgtgtgtgtgtgtgtgtgtgtgttggggacagggagggaaccaaatttggggtcacctctgagaacagggaaattacaaatattctcttgaattccagaatagatgacggggatttgacttagagccgagttgtaacttgttcttcctgtccatcaccccatttgtgcatgagcaagtcacaagcctctccccaagtttcaaatacgtcctctgacgagtccaaaagtttcgaatttgaggagcagatgccggatgcacagtgaagggagctggaacaggctagggggcactcactgctccgagcagcagccccccggatttcacctagctctacctcgccaaggttcatctgactttgagaacaggcctctgccttccctttctccatctgagaatagcggatgtcctgccacatacaatgctgctgtgcgatgccatcagagattgtgtacattggctccgaagtaggttcagatgtttgaccattgaacttggagaagaagagacccaatttcttgaaagacggacccatgaaggaccgtttgctcgacgactcggattttggctttccttgggcgccactagctcttggcacggttctgatgagcggtgcaccgtgacaggcctttttcttgcagcctacattgaaagagacactcttagacttggcccgagccccaccactgccgtcattggtatcatccctttgagagaaatcagcactgctggtggagaggcttcttcttggatgtttcctgtttcccaagaggtcaagcacttcatatcgaaagctggaaatgtcctgctttaattcctagagagagagagagagagagacagagagagagaaggggggaggagacatgttttatcagaaaaaaagttgtctttagtttaaagaagacactcaagagttttgcatcggctaagtcgtacctagtaataaa

SEQ ID NO: 36227 - DNA, 1187 bp, Mus musculus
accttagttgatgaatttttaaccttgacagttgacagcattacaagtttaaaaacttttaacaaccaaaacaatcattcacacttctctcctggttattgtgctctacaattgcttctattacttaatcttgtattattttccaagtagttttgtgctttgttattattgaaatagttgtgtttttttttagacaattcttttactacatctcacttgtcagttaaatattaccttaaagagaaaacataccagaactttggtgttccttctttatagcaaatacaaattgttttcacgatgggtccccttgaggtccttgacacagcagttcaactattattgtgccaaaaggcagtaacaacatcacttctaaggcagtttttcagcacagtccacaatgacaaacatataccaaaaccctaacatatttctcttagtagtttttaagtgtaaattttatgcaatattgtttttatgacatatatttacttcatcaattattgttttaggaatcattatcattatttgggtggttttgtgatttgaggaggattgaataaacaatattttattgggcccaaaatatcattagatagctacttctgttaaactttatgaccatatggcacaagaaagaagtgatgttggatatgattgaactgaaatgagtaaaaatgcgtaaccatttgtttaataattatctttatagaatgctagattaatgacttttctaactgaattttttggagaattcagaaatgtttgtattagtcacagatttatcataattgattttctgatgcatttaaaaataaatggaacactaaatgtatattaccgatgcaaactgtggataaaattgaatgaaaaaaatctaagcctggaactcattttttttttctattatgtttctcactatcgctattaccccctgatagtttgagtccatggttcccactgtgaaagaatagttaaatcttgagtgctggcaatgttgctcagtgagtaaaggtgtttgctgtggagcctggcaaccattcccaagacccacatggtggcagaagagaaccgattcttgcaaaaggtcctttgatttatggatactcgtagttcagctccacaagtgtgctgtggcacactattgccacacacaaaatacatgagctataaaaaaagagaaaaca

SEQ ID NO: 36228 - DNA, 1269 bp, Mus musculus
agtggtccaagcaatttttggaggaaaattggattaatttcataagagtttttgataaattaaaattctccttttattttgtgactcagtaaccttgaagaattttcaaaatgcaaattgatacaaaattgaagatatactttcaatttagcaatcacattaagttgaatattttttacatcactgtatactagtgaacatctaggtaaagtaatcatattttaggaaaacaatgctatatttgagttatttcatatacttctagcttataaacaatctcttcaatattttgtctttgtttcttagcaaaaaaatgagtagaaaaatcaaaaccctggcattattcaattctttagtattatcagttggtgccaaaatatttttcagttatactgtaggttgtttacatgtgaagtgcctgtgtaattgatgaatcttaaatagtcttaagcatttttgcaatttctttttatgtattaatagaatcaatggaatttttaaatattttggtaggttttgtatggtcagtagtaatgtgaggttttaaatgtccctcacattggtggtttcttagttaatccattgcagtttcccttgaattggttatttcatgttgtcaaaaaatgttaatatgcttaatttatgctatttaattttgcaaaaccgtaatcgtcgtttaaatcactttatctgaagagtattttatttctgtgttgagaacattacacaaagcagtaataaggctttggaaagctagggaagtactaattgtcaaggacatttggatgcaactgctacgtttgggttcttatctaaacttatttgaactttcagtacatcagtgctgccttccacattcagaaagcggccactaaaaaaacaggttttgattcaaaatctggccctttctggagcatgtataaaatatgatcctcaagtaacttgatgttgaatttaacacagtctggctcatggaatagtatgtttaattaagtccttccttgtttggagatggataaacttacggtgatactaatgcaggaatttttccaaaacattactgtgacgactaactcaatttcctataaaagagcctacatattcacttttgtatagccaagcaagtatcatttcttaactgtgtaattatttgcacttattacctcttaatatggatgcaacttagtaaaaacgttggtctaggatatttcaaagggcatttatgaagtgtaaaatgtcatgtgccaaatactatggtaaggattggtt

SEQ ID NO: 36229 - DNA, 1177 bp, Mus musculus
cggggcagcagatccaggatttacaatgagaagaaagatggagcatttacgggaagagcgtgaacagataaggcagcttcgcaatgtaagtcacattgacctcgtgcatctcctttacaggaacgggtttaattcagcaaattcataaagtatattgaatttttattcttaatgctttttcaatttttgatcacatgatcaataatgtgaatgcacaccgtgttcacataagatacctgcaatttatccttatttctttatagaatcttgaatccagattaaaagtcattttacctgatgacataggagccgcactgatggatggagttgttctttgccatttggccaatcacataaggccacgctctgtagctagcattcatgtaccgtcaccagcagtggtaagtagtgtcaatagattactgctattcctttaaaactctttaaataatgcccacaatacattttccaatatcaactaagttcttttagaagagtacttatcatgtgtgtctctcttctcctacctcacagcccaagctgagcatggcaaaatgtcgaagaaatgtagaaaattttcttgacgcttgcaaaaagttgggtgtttcacaggtaattatctgacaaacttgccatttaactattaatctgttacaaggaaagtaaaatcatcttcatagtggggggtggataacattttgtgaacacaaatttgagtatcttctttttgtctctttcatgcacatatatgtaattacagtgttttaaaatcttttaaagatggcctttattaagcatctacctatatgtaaaatggttgctaatcgtagctacaactgagtaaacagaatttagttgtgacaactgaagcttaattgtgacaccattgctgttgttatttaattggtgttgctggtgttctgctgagggacatttagaccccttgttgctctttagtgttatgctgcggaacccaatgcctcatacctgcaaagcacacattctactactgaattatactcaagttcttatttgtaacttcatgaataaattttaaattccatctaatatagttatatattagtataactatattaaaaacaatgaaactgtcaaattatgaattttggtacagggcaagagagatagctcagtgctcaagagcactggttgctct

SEQ ID NO: 36230 - DNA, 1127 bp, Mus musculus
acagttgtttagtgttggaattttggagagttatgtgtttctgcactaactactcctccttgcaactagaagcttcactaatcagtgtggagagcagtgcagacctctgcatgtaaacataaaaatttacaaggcagtttaacagcacaataacttagcaaaatgacactaaatactccccctgccccagcaccatgcaggaactatgggctcgctagcagtagtgattgaccatgtttatagtgccagatatatacttactcatgtggcacaattctctagatccagtcaggagagcagttggttagccataggagcagaattgccagtgttacaccgtggactcatcatgtccgccagggcagtattatacgatacagggtccatccatgggtaagtcatgacattttactatgaatattagctagctgggagagtcatggtgagctcaagactgatttccctatgtccactaacaaaactgtagagagtctcagctataggatccagaccattgacaatagccaatatccttatggccgcatatggggctgcctcgaccattgggagctaaattgtttctgggactgacacttttgtttattgacttgtggcttcaggaataactttgtccacacatgtatagtatacctctttatatgtctttttgaaatagcatgaatgacctcatttctcaatgagtacatatttataaagcttcacgcatccttagttttatttaacatggccacattcaacctcctttacccattcctgcctcaggttttttgtttgtttggttttgagtttttccagacagggtttttctgtgtggcattgactttcctggaactctctctgtagatcaggctgcctctgcctcccaagaaaggcaggtgccaccaccacccaaccccacttaaactttgaaaccccacaattcccctcacatgctttctctgcacctgtgttcccttgcctcctcatactacattctttccttggaatggaaggtcatggggtgtcacgtagcttctttctacacctcatttttgttaacccttaccacttggctaccttccccctaatgccacaaactgattaaacctttaggacaccagaatttc

SEQ ID NO: 36231 - DNA, 1139 bp, Mus musculus
cagagatctgcctacctctgcctcctgagtgatgggattaaatgcatatgccaccccagtctaccatctatattttcttaaaattcaaatttcccaagtctatcatatcttgtcctataacatgattaacagttcttttattgtttctgacaaagaaaaaataatgctatgacaaacattgttaggacatcagtgtcctcattttaaacagtgtgccttctgtggctttctgccaattggacagataactccaaaactcctttgacgtaaaaccttgcaccattgtgtactgagattactgttaaccttcaaaatgttactgtgttgagatttgaatttgttgtctttgttttaaaaaatattttttaagttatttatgacttagtaccttttcatacatttaagccctgtacattgttatctactttgtgaaaatgaatttttaagactttatgtgtgatattaattttaaaaggaatatattacggctgtaagtggctttgttcttgcacagtacaattaaatctgtgggctgagcatccagttatgccaaaaaggggcaggggacaaacaacaaacaatgaataaatgaacagtaaaacaacccaaacatttctctaggacccttctgtcagccatgcacttcagatatttccatgtgcaaatttataatctgaaaaagatcaaagttgcatacttgactccctgccctatgtaaactgccaccatggttcagttcggttattggcctatctcagggttctccttggtgtctctcagttgaagaaacaggttaatatgaatccccctctccccatatttcacgtcacacttccttgagatggatatttctgaacaatcttaccacactaagactttagggaatagaacacatagtctccttcttgggactcgctggtcatgttataacacaggtcccactcctgaccatgtgttctggtgttttattacatcaggaagcttgtgagctttgattcttagaagcatatatactcagtctttgccacataagaccaccagctctggaagtacaccgttagggagggcaaaattttccttacatcttcaaaatggcagacagagaattctgctacaacattctataatctatgatgcca

SEQ ID NO: 36232 - DNA, 1190 bp, Mus musculus
gaataagtccccctgttaaagaagaggaagcaaaaagagacaatacaaaaaaaaaaaatcaagtaactcaacagaagcagtagttattgcaactgcaaattaatctagtaatggtgaaacaatgtagatgagtcaagattactatgacatggaattcctgatccatcaagattactatgacatggaattcctgatccatgcagacacaagatcatttattatgaagaagccaaagctgtctgagaaaatagtagtgacaccaaaccaggatttggggatgaagactgcatatgccctttgggtcttttcaagacaccttatgcagacaagagacctcgtacaaccagataaacctgcaagtcccaagtttagagtgatactgtatggtgtccccagctccccccaggatacgcgtgagatcaagagaaggggatgggctttgaaggaatgaaacccataaaccaaacttcaaactcaaacaaggagctccgaggtctcctccacccacagcagctgcatttgctgagcaggcagcttgaggacccagatggcagcttttcaaatgctgagatgactgactggagtgtggcacagaaaccagaaagacttctggagcgctgcaagtactggcctgcttgtaaaaatgtagatgagtgtgtagctcatcatccaatctcaacttgcaaagcctttcccaactaaatctgctgagaaatgtttgtttgtgcatccaaattataaatatgacacagtgtactaaagcagattgtcccttctgtcacataagtagaagagccccggtactgactccaaaaccactggtggcatcgccagcatcgttttcttttctaatggccagctctgtcaaaacttccctgcttgtaagaaaacggaatgtcccttctaggacctgtgatggtttgtatatgcttagcccagagaatggcactattagaaggttgtcactgtggttgtgggccttaataacctcatcctagctgcctagaagtcagttttccattagcagcctttagatgaagatgtagaactctcagctccttctgcacgatgcctgcctggatgctgccatgctcccaccttgatgataatggactgaatctctgaacctgtaagccagcccaattaaatgttgtccttataagagttaccttggtcatgtgtctgttcac

SEQ ID NO: 36233 - DNA, 1190 bp, Mus musculus
aagtgaggcgacgatagtggcaaggcagtatgtcccctgagcaaacaccttgcttatatgtaaaaaactggagaggacagatgcataaatgaaaggcaggaaaacgcccacagccgcaatgcggaactatgtgtcattagtgtaccagccaatccaaagacgatctagctgagtctcaacttgtgtcccggacttcctgctgctattgctatggctccgagggcgggactaaggaaggccgcgtagccgaaagcaggctcccttggcgcccttaggtcctgtaaccctctgttctgaaggttccctgggctttcttagcacctataagtgcattctatagtccctctctttttatccggtctggctccccgattccttgctgtcggcggtgctgacgcgcagacgtgcacgtcatatctagctttctctgaccagtagatggcaatagtgttctttgctgctgctatgttctggttctcccccgccctttgtgcttgaaaaaaatagaaagacttttacttttttcccctccttttgtaatgcattccgttcctctgtctttgcttgggtaagggctgcttgcctaagacaattgggttttgtccttctgaactcttttcctgcctcaaaaccaccacctgaacttttcaactttattattattttttaccctctaaactgagtggcctaggcacctcacctcctctgcttttggctcctctaaaaggctttatttcttcaacttgtcctttaatctagggacagttatttgatctaggacaagttatttcaatataggcttcatttaaccttttgacatttctggaagtttattacaattcttacacacagtcccattattccatggtcaacattaattgtattttcgttataattgtctcactttttttatttataccagtacatttaaaatacataaacatcagtatttgcaccattgctgtatcatatttatgcaatcattacactgaatcccatttacatgtataactgctatgtgtaacattacattttcccttttatattttatatttccttgtcttagtaatcactttgaaagagtgaacctttttcttctaatgtggcaaaaatttttaataactgataatttttcaaaaaatacaaataaatcttaactccctattttagtggtaggtaccataaagtat

SEQ ID NO: 36234 - DNA, 1116 bp, Mus musculus
gccaagttaaaaaaaaaatagaaagtctttattagccagcaggcaactacactgggtatttgggatcccagtgtagccctgagcctttctcagggtgaacttagaagcacaaaagtcataggttaatatatttcagttaacaaaaacagttagctggaggtggaactatagaagccaaaggtaaagtaagtacatttagagactttcccagaactatggactttgatggattaggcctttgttttcattttgtcagtgctgtatttgtgctaagtttacagtctgaatagtacttccatcatagtcagttgtgctaaggtcttcaggcctactcaagtctggggccctgttacattccccactggtcttactgattaagttaaattgtggactcatcctgctttaaatatatgtagttgttcctaagaaccagtaattttattgaatatattataattaagattcaaggccaaatgttaatctattcaaaatgagaattaaaggcccagtcagtgctgccagcagactagttagccagggggaccaagagaacagcaaggtaccaattatctcatgtataattttttctctctttcttttgtaggttcttccatctacagcaagatttctactaattactcctgattgattaggatagaaacaacgtgtttcttgcaaaggcccctttctgagaagtaagtctaagcctctccaatttgtagggacatttctgaaagggaatctaactgttgttttaattcctgtaggtcctgatcaacctgtcttcttagtgtcagaagaggcaaatttaggcaaaccatggtccaccaaatggttgcctcaagactaggtaatattgctgctattcagatgagttaactcataaggcagaatagctgacatcagaataaggggaagtatttaggtaaaagattttggatattagacaagttttagtcccttataaactgtaatttaggctgtttccagtcgtgctgagttttgtcagtcaatgggctgacagtctggttagttcctatccctatgtagtacaggggctgaatgttcaggcataaccagtaatcctagctggtttctagctgggaatagttaact

SEQ ID NO: 36235 - DNA, 1239 bp, Mus musculus
aaatcatgattttatatttacctaaaattatgaattatgtagtgtgtgtgtgtgtgtgtgtgtgtgtgtgtgtgtgtgtatgtatgtgtattaaacgaagttaagccacttcgactgacatgttttccactagaaccataggctaacaaaacttcagtaccaggcacaagaaacctcctttcaagtggttggccagggtagttctagtgacttcccaaaacaatacagattatagatatatcctttggttgcctctcaccagttaggaaggtgggctcctgttgctgaagatacaatactacacactcagaacacatggtttggataacgtgagctggatgtgagcttaaagattctttcctgtggtctagctttcactgtttcagaaaatactattcaggctgccaagagagggcaactattaaacacccctaccaatctgcaactcctatgaaccacgacagttaccagcatggaaggatagtagaaagatgcaataaataagtggctctcatatcattgatggcaaccaatagctgtctaattggtcttaaggcccactcaacagtagagaaatcatatctggtataggaaaccgaggcagcttctccaggataatgagggcccggactttagaaaagaatctactaccaccagtttgctagataagcataattccttttacattctaaatctgatccttctacccacagataactgtagctacccctcatcaaagaagcctccctttccaaccaatgggagccgtcaaagaaaaccacaactggctataatgtagcgatcaacaaatcatggggaacccagccccaacagatataccctcagcacagctgctgcttttatatagctcagggaacattgcagaagaggggctgtaaagattctaagagccacaatagtaggaagcctgctgtcagcaaccagtcctagaaatggctgtgtaacaggagcaatggcattattggtggcatatgttaacacggaaggaggaaattttgcagggtctcacccctaggcagagaactataggcagatatgttgggagaaggagaattagcctctcagggatgtgccctcttactagttgccctagtgctgcatggtcagccttgaaaccatatacacataaacaacaactgactcagaagggtgtgtgtgtgtgtgtgtgtgtgtgtgtgtgtgtgtgtgtaacaaatataatcgaactgagagtgggga

SEQ ID NO: 36236 - DNA, 1171 bp, Mus musculus
tgtgggagctgtcttaaatgtatcctgtgtgccagcaaaacagtgcccagctctgtgtacccgcttcctccccgagtttgcaggtacccagctcaagattcttcgcttcctagttcctcttgagcaagaacctgtgcgggaacagcaagtcctgcagcccagccatcaaatccaggcacagagacagccaagaaaagccttcatgcattcaaccaggcttcggaaaagtcaaggtggccccaaaagaaaacagaaaaacctgatgagttacttccagccttcctccagcctttcccaaacttctggtgtggagctgcctaccctgcctctggtgggccctcttacaaccccaaagactgcagaagaggtggcaacagccacaatgctagaagagaagaacaaggttccagagtccaaagatgagaagggagaaaggactgccttctggaagtctatgctgagtgggccctcacccatgcccctctgtggaggccacagggagccatgtgtgatgcgtactgtgaaaaaaacaggacccaactttggtcgccagttctacatgtgtgctagaccccgaggtcctcccagtgacccctcttcccgctgtaacttcttcctctggagcaggcccagctgaacagactgaggcatagggatgtcttcgtgttcaccccgtgcacggggtcagatgccaggtccctgcctatgaaggcttctttttgttctctgctttccctccactccttcccttctccccctagtgcctctcccctttcacatctctgtttcttcctctttgcacatggaggagcagggaactaatttaatccccttcaacccttgttagggcataaataacattttgttcataaataaaggtcacgtctttgtttcagtagaccatgttgagtggatattttagatgcactctaaaaagttgagtgtgaggctctctcatttcgaggcttgcttggcctcatgtaacccagtgagatactatcaaggcgacatggtggagggaggagttgtgctccccaggaaaggtgagctctggggatcatttgctactctgaggttggatcagtgaagaaggtgggtgtagtgtgagggtgtgtattcttaaaagagttttctaagtagtgtgttctacagctgttacacatgaatcacc

SEQ ID NO: 36237 - DNA, 1201 bp, Mus musculus
aagtatatgggactcctctttcttaatgtccagttgacagtcccacattgtgtttttcagtcacgtgataatcctgggggacctgaatacagcccaccgacccattgaccactgcgatgcaagtagtctggtaaggttccctctaaaccataggccccagttttgttccgttcacccagccagccaaaactgggagtttggcaccagaggtagtctcttttatggaaaaaaataatgattactttgagtatatattttttttttcattctgaaattacatgtgataattgtacatatttatgaagtaccacataaaattctgacatgatagtcaaatggggtaaattgctgtattcatattcatttcctcaaacatttgtctttcggtatgggcattcaaatttttttctacaacctggtttgaagtatatagtaaattatcaccagttattactatactgtggagtacaaggcctttttttctcctatcaaactattcacactagccagccactgtatccctttccttctgtctctcctggactcttgtgacaactatactctgttccatgtgattaccttttgagactgcaatacaggaatgaggtcacatggcatcgatctttatgggcttgccttgatttttttttttttttttttttttttttttttttttggttttccgagactggctgtcctggaagtcactctagaccaggctggcctcaaactcagaaatccacctgcctctgcctcccaagtgctgggattaaaggtgtgcgccaccactgcccagctcttgccttgtttttaagtcttccagttccattcattgtgctgcagatgacaagaaaaatctgttctttctggctaaatggtattgtactctgtatgcatgttatattttccttatttattcattaatgaatatatagtttgcttgtgtatctgggctgttgtaaatgatactgcagtgaatgggagttcaattgtttctttgacaaactaatttcattttctttgcataagacccagggtcctgggttgtttgaaaagtcctttgagactttaacatgcacacaagcttgagaaatactgcccccagaatagatacaaaattcttcaacttgaccattctcatagaaaggagtgctttgctagaaaaacaagctgcctgctttttctctgctcccatgtgagc

SEQ ID NO: 36238 - DNA, 1148 bp, Mus musculus
caaatgccattgaggcatctagcagacagattggggcatctggcagacagactgaggcatctaacagacagattgaggcatctagcagacagactgaggcatctaacagacagactgaggcatctagcagacagactgaagcatctagcagacagactgaaacatctaacagacagattggggcatctaacagacagatcatggcatctaacagacagattggggcatctaacagacagattgaggcatctaacagacagattggggcatctaacagacagacagaggtatctagcagacagattgaggcatctaacagacagattggggcatctaacagacaaactgaggcatctaacagacagattggggcatctaacagacagactgaggcatctaacagacagattggggcatctaacagacagactgatgcatctaacagacagactgatgcatctaacagacagactgaggcatctagcagacagacagaggcatctagcagacagacagaggcatctagcagacagactgaggcatctagcagacaaattgaggcatcagctgcagctgtgaggcccaaaaagcccagggggaagaagggtaacaataaaggctcaaattctgcttctgagccctctgaggctccacctgccattcaaacggttacaaaccatgccctatctgtcactgtacggatcaggagagggtctagggctcgaaaggctgccaataagaatcgggcaactgaaagccaagctcagatcgctgaacaaggagctcaggcctctgaggccagcataagtgccctggagactcaggttgctgctgctgtccaggccttggcagatgactatctggctcagttgagtttagaacccacgaccagaacccggggcaagaggaaccgaaaggtgagatctatgagtttatccttaactttgtgctactttcccattcctatcctaggttcatatcctgtgttcatagaagctataggatatgttgaaaagaatgtgatccatttttgtgtcctccagtagtttgtagattggtggggaaatatatttgtgtatttaatcaagacctatttgggactcacttgtatttacatagtatttaaccatgtgccagactttcggtca

SEQ ID NO: 36239 - DNA, 1331 bp, Mus musculus
ggatatattatagccctgtagtaatgaaaatatggcactggcaccaaacagacatgtttgccaataggacaaaacagaagacccaaacatgggtacttataactgcagccatctgctatttcatagaggcaaaaaacacaccctggagaaaagacagagcatctttaacaagtggtggatacagttgaaaactgtatggccacatgaaaaggaatggattagattcatacctgtcaccctgcacaaaaattagatccaaagtgtaccagtgacttcaaatttgaaacctgcaacatcaaagctgctagaagcaaaggtatgcagttccctataagtgatagatgacggaaaggactttctcaacaggatcacgtttgttcaggaattaaggtcaccaattgacaacagggacctcataaaactgaaaagcttctgtgcagctaaggaaataatcaagtgaggaggaagcccacagaatgggagagagtctttgccagctacacatctgtcagcggactaatatctacaatatatgacgaactcaaagaacaaagagtcaaggaaacaaacaacccaattaaatagtgggctgggcatgtagacagtttcaacagaaaatagaaagggctaagaaatacctcagaaaaaacattcaacttccttagcagttagggtaatgtaaattaaaccaatgctgacaattcttaacaagaccactggcaacaattgctgctgtagatatgtcactgggaatgcaaactgctgcagccactctggatgtcagtttggagactcctctgaaagctagaaataaatctatcaaataacccagccctacccctttggcatatgcccaaggggcatcctactccatagatactttctctgccgtgttcactattgctttatagctaggaaatggaaacaaattaaatgtttgacaactgacaaatgaataatgaagatatgattccagaagatctaagaattcagtagctgttcagtacagaaggtggatatgtcagctggtcttcagtatatgtcagagtcctgaaaaaagcaggctctaatgccagtgaagggatggacttgctaacaaggtgagagcaagcaggcaaagagagaacaagctgccttcttctatgtccttcatatagactgccaccacagaaggtgtggcccagattaaaggtggatctttccagcctcaaaagatctgaattaaaggtgattttttttctcatttcaaattatttaattaagaaaaaattccctcacggggatagccacttgagtttaattaaccccagaagtagtcaaattgacagtca

SEQ ID NO: 36240 - DNA, 3548 bp, Mus musculus
gaagacacaaaaatacttggaatccttcgagtctgaaatcatgagaaagaaactatgctggggtgatcacttataggtgaatggatctccttgtgaggttgacaggtgtaatggcctgttttgttgaatgattagacgtgtaactgagccgatttggaggttggtatgggccaagttagtgattttatttacgtgtggcaggcctgttggctaaggcagctacccagagattgcctgtatttctccctctacagataaaatcgccactaagttgtctgactccatgatgtccatgcttgacctctctggcaactccgatgactgtgcaggtgactgagcagctgaccttccccctcatactgcaagtactgcttcccgtgcgatgggagagtccagatgcctttccattctccctgatgtacttaataggagaacacctccatgtcatgtatcttctgctgccgtgccctccattcttatcaaaggtctggagctgccaaaccctactaccctctacttaatccttcctgtctttgaaaatgaccttgtgtttgttttgtggtgccagggattgaacataataggttctcacaaatgttagacaaccattctattaccaagctgtagtattaccatcattaccatccatcattatcattggggagtctgcttactcaacctcccaagtactgggattacaggcttttgccaccattcccagctcccactgtgttttctaaggtaaataaaatcagcagactcttggcatggtggcaacatatctataaccctgacacttgggagactggagctaggaggactgtaagttatgggccagcctgaactatctggcaagaccctttctcaacaaaacagcccaaaacaaataagcagagtccagctgggcatacacctttaatcctagcactctggaggcagaggcagatgaatctcgtgagtttcaggccagcctggtctaccgagcaagttccaggatagccagggctgcatagagaaactccgtctcgaaaagtgaacaataaaacaacaaaaagaatttgtaattatttaaaaagcaaataagcagagtccaagtgctgacaatgtaccttggactctaaattcctgtgtcgtaccctgtgagttaggctgataagggttaaccttttggacaggtaaatgtcctaaaggctagactgctgagaaacctggtagcagtggcgggggaggtggcggttgtccctggatgggtgatccttttcatttttatcaccctacaagatctcagtgccaaggctcttgcctgtgtattttccaaatcaatagctagctcctcatctgggtagtgtaggagtagagaaggatagtgtgagtctcctgtctctggaagtgtctggggatagtgtagaggatgacgattctagaaagggtatacctatcatagtaagttggaaagccattggctgcaggatgttcaggaaatgtagaccgtacctgttttctggacggttaggggctgagcacaaactactaaacaatgagaaacagttaccacctttaactttcactatatccgtatcaggaaggggtaaggctcagaaagccgacagaatgtgctcatgtcaacagtaagtggtggtgtgctagatgtcaaacttgagtctaatttaaaccttatgctagccttttggtttgcattattttgccttttcaacaagggcacaccactctggtattttctgttgtcatatatttaaaatatattttctctactctgttttttatttttatttatttatttattttttgggtttttcgagacagggtttctctgtatagtcttggctgtcctggaactcactttgtagaccaggctggcctcgaactcagaaatccgcctacctctgcctcccaagtgctgggattaaaggcgtgcgccaccaccgcccggctctgttttttaaaaaatggtagtatttattgaaaaactatgctttctaagtctctttaaatgatgtccaacttaattcactgatctcatcttaagttttgctagacaataatatattagaaataaaagtatctagattcttgggaacataatcatgtcaaaataaaatagaactaaaaccaggtgggtggctcacaccagtgctccaagcactaagaatgctgaagcaggaagatgtctgaagctgagtccagcctgggctgcagagtaagaggcagtctcagggcgaaacaaaataatgtgggactttagatattctaactctaatgtatctcaaggttgggggtagcatgcgcacgcacgcacagagagagagtttcccccatataacccagtgtggtcctgaactttttaggccccccccccattagctttccaagtgctgggattgcaggtgtttgctttcatgcctggatatttctttgttcttaaaacaatttcttgggtctttactctccccttaaaaatcatttttatacaataaatctcatccttcatggttctatggttctgtaagtttagacaccttttttttttttttttttttccgagacagggtttctctgtgtaatcctggctgtcctggaactcaccaggctggcctcgaactcagaaatccgcctgcctctgcctcccaagtgctgggattaaaggcgtgcgccaccacgcccggttatttagacaccttttaacaggggtggcctgccatcataatcaagataagagaattttgtggcatttccccaaacttattgtgtcctcttgtagtatagtcctgcccccatcctcaaatcctagcaggcacagacctctttcctgttccttaatataagtgtcgtaagtcacacgggggcttattttatggcattaagcttttagctttttccttttagatcttacattgaagttagatgcagttgtataagctcggataaatggataaagccgagtaatcattaatacaggacagaagagttctattagcctctcctttaccattcctggtaatttatagtcaaaccttgttctctccctgacagtcacggacttgtgctttcactttatggcttgtcttttgaaaagagttgtaagtggaatttaatagtatgtaacttttgagattaatgtgttataaattatagacttgagatccatatcactggatgtatcaatagtttgatttctgtttcatatgctattgtgtggatgtcttattgcttattcaaccctaagttggattacattctttacagttgaggaggaagttataaataaagctgctaaaaatccttgtgtgagactgttttcatttctttggcattactacctagagttggattgctgcaatatatggtaagcatatgactaacaatctaagcaactgctgaacttctttgttctcttgatgcacattagaatattattttgcctgcatgtgtgtctgtgtatcatgtacatggcttcctgtccacagaggccagaaaaggtgtcagatcccatggagtgaaattatagatggttggttgtgagccacaca

SEQ ID NO: 36241 - DNA, 1071 bp, Mus musculus
tagtgaaaaaagattatgtttactgggggtggtggaacataccttttaatcccactacctgagaggcagaagcaggtgttctctatgagttccaagcttgacagagcttcatagtgagaccctgtgtcaaaagagtcatctgaagggctctgatggtagctctcctgttctgttgttttaaattcctcagcagagtagtgaggtggttataagtgtggactacaggaatttaaataaatttaagttttcttcctcatttgttgtatgatattgagcaagtctgttcacttcactctctctgtgataccatttgtaaaacaagaacagtagcacccattccagaagggtattgtgtagatttacctaatttgtaaacgagggcaaggggtatagcccagggatacagctcgtgcttagtattcacaaggccctggttcgaccctcagcactaaaaaacagtaaagcatatagaactatagagcctggcatatagtacatcagtgctctgtagatgctatctgggggatatggaggagtgactttccaaaactggtgaacaggtttctgctcttagacactactatttgtagtcctggtctgtgcctgtagttcctacttcattctctactctgtccaggactctctggccacacattagggaatagttgagaaagcattgtttgacctgcagtcctattttctgctaaaggccagtcatttccttctgtgggtgctctgaagtcctggattacaaatgaggacaagaagacttgcctgccttctagtttattccatgtgtggcttgagtcaagtcagcctgcttgctgaattttaatttctgattctgtcaagtagacagttgagagggacttaaaattatgttttaatggtgatgcttgagcctggatttttaagggcaagaagagtgtcatcactgtagggagaagtcaagggtggggaagaggttataggtaaaaagtatttgaaggagttggtcctagtgtggcatcttgaagagtgagcaggagttaaggcattcagtaaagtaggtaggataaggttggtagaggt

SEQ ID NO: 36242 - DNA, 1152 bp, Mus musculus
catggatgtagggaaaggtgagcatttattcactgctggtaggcacgtgtaaactgtacagccaatttagaagttagtataaaggttcctcagaaaccgaagaatagatctgccacattttatggcacacactttgcgtaatgttagttctcatataaccgtgttttttacagaatgtattttcattcatatttttaataaagttactagaagatattttgaacttaaagaaaaaataaaagagccaaccagataggcttcacctgcctcctgcaaaacaccaatagctgcactctggaagcacacatctgttttgaagtcctgagcagttttttgcaccagacactgaaaacagaagttcagtggacttctgttagtatctgatttcatagagtgctacagtatcagactgtaacaatgaagtttcttcatctcccgtagagggcacctcttgtgaggggtttttgtagctagttgtttcctgggtgctttaccaatggcagatagatggacagtcttctttgaaggagccatgatatggacaccaccttacttaccctcccctttggctggagctctgtgactgagaggccatgctggcattatagtgcctggcctgctttctttcttttttttttttctgagtgtgtggtcaatgaggccaaactgtgaccccaggtggacttttagagggaatcccctgtttaccatcttatttctacgcctaatcagccatcccttatgattaaaatcaggtatgttatgaaaagggatatgagcagatgaataatgagtacataacttaatctgtcaatcaaagtagacaaccacacacattttgtgtcctgcaaataaactcttcttttttttcataattttttttccattttttattaggtatttagctcatttacatttccaatgctataccaaaagtcccccatacccacccacccccactcccctacccacccactccccctttttggccctggcgttcccctgtactggggcatacaaagtttacgtgtccaatgggcctctctttccagtgatggccgattaggccatcttttgttacatatgcagctagagtcaagagctccggggtactggttagttctggcctgctttcttatagaaccctggacc

SEQ ID NO: 36243 - DNA, 1200 bp, Mus musculus
cagtttgaaatagctttgtgtgtgtgtgtgtgtatgtgtttgagagagagagagagagagagagagagagattttttgcgtagccttggctgtcctggaactcactctgtagaccagactggcctcaaactcagagatgtgcctgcctctgccacccgagtgctggcattaaagccttgtgctaccactgctgacaatttgatgtatctttcatccatttattgccttgcatccttagcagtagtatgagggtgaggagactcaccatctacactaagcctctgtacacgcatctcaaatcttcttcctagttcaacgaccgcctcctttactgcgtgcccaggctgcggctccttggtcagaagtttagcgtgcgggcacgcattgatgtagatggcatggaggtaagcaccctgagaattggagatgtggagtggggcattggtattgggaggaaattgcctactctgtccccagtctatgtatacatatgtgtaggaccctatagagtgtataggcctcaccatgatccttcccttctccttttagctaaaggagagctccaacctcaacatgcctcggaccttcctggtgtcaggaaagcagcgctctctcgaactgcaggccaggtacctgtccttgcctatgcgttccctccaattcactctttttgtttgtttgtttgtttgtttgttttttgagacagggtttctctgtatagctctggctatcctggaactcactctgtagaccagactagcctcaaactcagaaattcacctgcctctgcctcccaagcgctgggattaaaggtgtgcaccaccaccgcccagcccaactcattctttacttcagatatgctgaggcattccaggccagagaaagagtgaacacctttccccaaaagatatggccttgctcctcagctatgtgtgtgtgtgggtgattctgatgatgacacatgtatatacatggtatgggaaaaggtggtatgtcagtcacaaaagcattttggagaatgaacaaactccagaatgcagggaagagtgggttacttaccactatcatgaataacatcaccaatgcctaccaccacacatggctaccatcagtccattttaaagctgaagaaattgaggcacctttcctagatccagccagcaggattagagctgaaattggagcttaggcttcgtcagc

SEQ ID NO: 36244 - DNA, 1102 bp, Mus musculus
aagatggtatcaggtactctggaactagagttggatatggttgtgaagtgggtgcaaagaattgaatcaggatcttctagaagaatagcaagtgttcttaactgctgagtgagctctagcctcttaaaaatcttttaatgaaaaatttctggtgtgttgggtttctgcctgtaatcccaccatttgagaggcccaggcagggagattgccagaaaattcaaggcaagcctgagatagaacatgagaccttgtctgaacaaggttaattttaaatatacaagaaacaaaacaaaaccaaacccaaacagtataagcatccataatcttaaatatagcttagctggttcttatcttggcaatttatggaatcagctgagaactttaaaaaaatcccgatgcctgggcttcatccccaaagattccgatttaattggcctgcaagtattgccaaccaagctcctcaggtgattggatatacaccaggactttgagccagtgattaagagccaatactacagatagaagcagagaactcgcctaccatccagaagacttgggtcccatctccagaacttctctttttccacacacaagacacctattgacattttttggtttggtttgtgacattttcccccaagccatccttggaactcctgagttcaaatggtcctcctgacttactctcatgagtaagtgggactaacaaatatgaatttcatccttatataccttttgaatggccacaaattccaccataattcttaaaagtccagagtaacacttgttcacagccaagaaatgaaaagttgaaaaatataaataattttttatgactatattcagaacaaacctcatctcgttgctgggcttatagatatttgccacaatttctagcttccgtgtgggtcttagggtctgagctcaggtcttcatgcttacatagcaagtgttttaatcactgtgccatttcctagtacctgctgccacattttttatgaaccttttccaaagtacagaaaactagaaagaattacagtgagcactaatgaaccaccatctagaatatacaagggttaacgtgctgctgtgtttagcttat

SEQ ID NO: 36245 - DNA, 1205 bp, Mus musculus
tcccctttgctaggctcaccctgcccccaaaggacaaggagaggagcagcccagctttgtcagatggctggaaaaacctgaaggagtgggatgcacacctgaggggctccatagatgtacagcaccaagggttcattctcaggaaccacaaaccatgccttgtgccatcctttcccacccttctccatgtagtgcaggaagctgcagatgacgctgttctcagcagcgaccgaggcctgtttctgtgatcagagacacaggacagggaacatcaatgttgatggaaggctttgctcttggctttaacagccccatagtgtatggactatgtctcagacaacggtagccaagctgtgcaaatcatagctgaaatgatttagccttcatcatggagataaaacaaagcaaggcttggctgctgctgactcttaacaacaagtataaggggtgtgcagatctcagtggggacagtgaaatgctggccactcttaaggctaagggactttcacagctaacccttttcatctttcataatatactcattgcctgctctgagaaagtccttctaacattatgattaatgggatgagtaggtggctaacaccatctgtctcgatcctaacaatagatgaaaatgcaggacttgtgagaagagcacagagggtgtttatgagattgaaattagcataagcaaggcatttaaaatagttctggtacagagtaagctcccttacatttgggataccttggttttgttgaaaaaacaatcaccccaaatatgtgtatattcatggtcctaaaaagataggatcagtattaacagtggcaacttctgggtaaaggaatatgtcttatgtttccttatcctatttcataattttaaaaatgcacttggttcattaaaaagaaaaacctataggctagcttaggctatgcagtgagactttgtctcagataaaatgatccctagaagtgtttttctggttgtataacttagtcaaatatcctctctgggttttagtttcttcctatgtaaactaagggtaagagttgagcagttactgtaagagttaagtgtgtaaagttctgtaataaaaagtatccttttaacccgtacactcattttccttgtttcaagtctggattacctgattaatgagtgcttaccctgggtcagtaactatggcatactttgaggcttgtgg

SEQ ID NO: 36246 - DNA, 1206 bp, Mus musculus
tcccaaatgtaagggagcttactctgtaccagaactattttaaatgccttgcttatgctaatttcaatctcataaacaccctctgtgctcttctcacaagtcctgcattttcatctattgttaggatcgagacagatggtgttagccacctactcatcccattaatcataatgttagaaggactttctcagagcaggcaatgagtatattatgaaagatgaaaagggttagctgtgaaagtcccttagccttaagagtggccagcatttcactgtccccactgagatctgcacaccccttatacttgttgttaagagtcagcagcagccaagccttgctttgttttatctccatgatgaaggctaaatcatttcagctatgatttgcacagcttggctaccgttgtctgagacatagtccatacactatggggctgttaaagccaagagcaaagccttccatcaacattgatgttccctgtcctgtgtctctgatcacagaaacaggcctcggtcgctgctgagaacagcgtcatctgcagcttcctgcactacatggagaagggtgggaaaggatggcacaaggcatggtttgtggttcctgagaatgaacccttggtgctgtacatctatggagcccctcaggtgtgcatcccactccttcaggtttttccagccatctgacaaagctgggctgctcctctccttgtcctttgggggcagggtgagcctagcaaaggggaaaattaaaacccctatccttatgtgacagaataggtaggtagaagagtttggaggccaaggtatggggacaatgagggtgaggtgggaagtctggctttctggagaaaacagtagaatagacaggcacctctaggtctgacacttaagtagaacagaataggcagatagaggaactagccaaaggactgaatctataatagttgatttgggcatgggaggagatagccatgtaaaccagcctgccttctagtcccagttcagatatcttcctgttcattacagtgaaatcagtgttcttcagcagagggaaacagcagaacagagcagtttgactgggcagaggatactgcctagcccctagatgacactagttctctgttccttctctccaggatgtgaaagcccagcgcagcctgcccctcattggctttgaggtggggcctcctgaggcaggagagcggcc

SEQ ID NO: 36247 - DNA, 1261 bp, Mus musculus
agaactccagcggcgctggatggctgttctcggcagggcgggccgtggggacacattctgcccagggcccacactgtctgaggacaaggagatggaggagacaccagtggcagcctcaggagccactgctgaacctcctgaagcctcccagacccgagacaagacctagagggtttggggggaactgggagtttctgccccacactccagctgcccatgttcaattgggggctccagcccactcccaatgcagtcaatacttgaattcccatcaagggcactttcaatcccgaatgctgggtcatgggttttttaattcatcttttcacaaaaggtgggctttttaaaaaaaaaaaaaaaactattcctacattgatgttaattttttaaatccctgtccccagggagggcgggagctaattgctagactcacttgaattagtttcctcccagtaccccacttccacccagctccccacaaaagtaccagaggcaggagacctggattcaagtgccagctctgctactgaccctgggaccccaacccaccctttcctcctcagccagtgtcttcacatgtatgaccttacatggggtggtgactagacccttcttgcctttcccatggcttatagcttctacctagccccaaagcaatccagtattttatcgtccagatccatggcagggccactgggcaggacgggaatgggggagggggggggaggacaatggatactgttttttaaagaaaaatacagtttatttcaggcatacagtaactttcagagcactgctatggtccgtccgtttgtccaaagtcccaggctactaagggagatgggagggtacagaaactactctcttgccaaattttgaagctcagcttgcagaaagctgattccaaggttaaatcatggattaaacaagaaaatgttatatgttattaaggtcttaagcctcatccctggacttaaaacagcccaactttctcaagttcaccacttttagtcaagtccttcaaactctcaagggtattcaaacagggagcattcccaggaggatgcaaattctgggcaggatgagggttgttctgagggaggctagggtggggacattggggaatgtagagatgtctacatcttttctctcttccaactgtatgcttatcctggctggattaccaatccagccagcctaccactgtggaattctggtcctttccacaaatgtacctgccagttttccacaagtctggtct

SEQ ID NO: 36248 - DNA, 1149 bp, Mus musculus
ggaagtgatggcggttgtaggtggtagtggtattttcaaggatagctcacatagtcatggaaaacttagtagcagagcctgggtaatgtacttaagagacttctcttgtatcttccttccaggtgacagctactaatgatggggccacaactgacgaggtctgcccacagcctcaaccctctgatccagacacccagactattaaggaagaggatatagttgaagacggttggaccattgtccggagaaagaaatgagcagggcagtacatgttttgggccctcgtttgttaaatgttatgagacttataggagctgtttgggggctatacacctctgttctggaaaccataacccttctttgttcccctgtccttcccttcaggagaaggaaagccctagttgtggggttgatgggacctattccagccccttgaatcttaaggtaccatatgagagctaagagcaggtttcccagcatagtacctcctaggtgcagtgactatgaagacggctgacaagtgtgggtgtggttgtagaccagacttgtggaaaactggcaggtacatttgtggaaaggaccagaattccacagtggtaggctggctggattggtaatccagccaggataagcatacagttggaagagagaaaagatgtagacatctctacattccccaatgtccccaccctagcctccctcagaacaaccctcatcctgcccagaatttgcatcctcctgggaatgctccctgtttgaatacccttgagagtttgaaggacttgactaaaagtggtgaacttgagaaagttgggctgttttaagtccagggatgaggcttaagaccttaataacatataacattttcttgtttaatccatgatttaaccttggaatcagctttctgcaagctgagcttcaaaatttggcaagagagtagtttctgtaccctcccatctcccttagtagcctgggactttggacaaacggacggaccatagcagtgctctgaaagttactgtatgcctgaaataaactgtatttttctttaaaaaacagtatccattgtcctccccccccctcccccattcccgtcctgcccagtggccctgccatggatctggacgataaaatactggattgctttgg

SEQ ID NO: 36249 - DNA, 1229 bp, Mus musculus
gggggtttgcagaagggaaaccaggaaaggggataacatttgaaatgtaaataaagaaaatatccaataaaaaagagctgtatgcaaagtggtttactagtcagtgtagctatattaaaaatgataacgcatacttagtccctgctatcttagttgctaagttgtacagcaacaagaataaactttttattaagaaagtttaaatcccgtgacttgttttttccttaatgatttctgttgtatgattttaaaactatctcttttccattcttcaggttgctatgggaatatatgaccatataaaaggaagtacattctgaaaattctcatacctgagatgtaagtagactgaagagtgaaacaagaacaaatttagtgccaaccttagttacaatggccactgattctggggagccagctagcacagaagattctgagaagcctgatggagtttcctttgaaaacagggctgcccgggctgttgcccctctgactgtagaagcgagaataaaggaaaaatacagtaccttttctgcttccggggaaaacatcgaaagaaagaggtttttccgaaagagtgttgagatgacagaagatgacaaagttgccgaatcttcccgcagagatgaaagaaaagctgcaacaaatatttcaagagtagataaagttcctacaaatgtgctaagaggtgggcaagaagttaaatatgagcaatgttcaaaggcaacctcagaatcctcaaaagattgcttcaaggagaaaactgaaaaggaaatggaagaagaagcagaaatgaaggctgttgcaacttcccctagtggcaggttcctgaaattcgatatagagctgggaagaggagcatttaaaacggtatataaaggattggacactgagacatgggttgaagttgcttggtgtgagctacaggtgcgtatataattttcttggctttatgaatttcaaatttagctaccgggactgcgagaatgatccggatgaagacgtaaagagcccttctaccatcactgagaaattatgctcttgttaggaatatatgccaagctttttaaaaattatcttcccctcactgttctatttttcttcctcttcctcctcctcttcttttgtggcaacactgaggatggaatcaggagccttttcaagctagacagtctaccattgagatatatttccatgccagttttgcctttaacttaattttgcagtgc

SEQ ID NO: 36250 - DNA, 1151 bp, Mus musculus
gcctcataagagctggtgtcaaagacttacatcatagtgtctggccttttcttttcttgagacaggatttcaatgtagaccaggctgaccttgagcatactatatagttgagaataatcttaaaattctgaccttcctccttaagtactaggattacaagtatgagctaccatgcctgtctaaagttggatttttaacattttcacctaacactgaatgttttaaattgtatttcattagtacagattgttaaattttctggttttttttttgagaaagggtcattctacattgcttagactgtcctgtaacttactctgtaagccaggctggcctcgaactcaaaagagatccacctagctctgcttcccaagtgctggagtaaaggtgtgcatcactacacccagcctgatttacagatttcctttgagggggcagaaattgacagatagtttttatgggaaagaaagacttgatgaatatatatttttccttttaataaaaatgtggttgtggtattattttacaggcactcctgaatttatggctccggagatgtatgaagaacactatgatgaatctgtagatgtttatgcttttggaatgtgtatgttggaaatggctacttcggagtatccatattctgagtgccagaatgcagcacaaatataccggaaagtaaccagtgtaggtataattttattcattttacttaacagattgccatattttatattgagattgacaaaattaacttagtcaaatttaattatggaacaaagtgtgtggcttagtggtagaatgcttgaccaatataaacaagactctagtgaaaaaaaatagccacacccattatggtttagttttatataacaatgttagtttaacaattgcatttagtaaagctttagatttataaaggtttctatttatgtacttgaactctattgggtcatataaaatgttctacattattttgtagaaaacatacaggtttatttatagtaaaattttagatattatatcagtcttaattttgttttgttctttttttctgagacagggtctcactatgtcactatgtacctttgactgtctgagaacttactacatagaccaggctggactcaaactcagagatctgcctgcct

SEQ ID NO: 36251 - DNA, 2351 bp, Mus musculus
tattagcaggaaatcctggactcgaaaattaaaaagctgggcatacaggctacggcagtcaaccagctttttcaagagatcaaaagtccgtcaaggtagtgtgcttacagtcagggccatagactaggtaacatcatttttcatctacttttttttttttgtcgttcatactcaaatcttgccatgttttccatgtagcacatgtatgttaaatatcccattaatgttgttgccattttattttttccttttgtaactaatttggtttttcagttattcatttcatatagattgggataaatcttgcaatgtctgatttagagttagggatttaaacaatgttgcttatacattaacaccttttaattattagcaagggttaaactttctgcttttcttcatttttggtaatataaacaaatttgtcttaaaaatgattttctcttttctgcttataatttgacaaatcttacagtggaaacagaagataaaagatcagcaattgcttctgatcccattcctctgacacgggagttctcatctgatactagggctttgagtagatgtaaagcgatgagtggatcatttcagcggggtcggttccaggtttgtgtctttggttgattttatctttgggtgcctaatgagaggaaactggactggtgatagagcttcatggtagagtttgcccaccatctgtcatcctgggttctatccccaacactataaaaaagtgacagcatttgaaattgatctgtggatgatctttaactgtaaatatttatatagctaatttctttacatatttatataagatgtaacatatttatattatacagaaagataaaaatttcttcaacttttcaccttatatcattgaaggtgaattgaaagagtataagaattttttagtagttgtaaaagaacacagaaataatcattttaggggtcatcatttttaatctcccttttttagatttattgtttttatttgtgtgtgtgtgtatgtgtgtgtgtgtgtgtgtgtgtgtgtgtgtgtgtttgctcacagaagccagaagagggtatccgatccctgtgagctggagttacagatagttgtgagccacctttttggtgacagaaaagcagagaatactcttatctgctgctccatctctcctgcctctttaatttaatttcatgtcatttagaatcttagcaaattttatagtgggattttatttgaataagtaaaatgaagctaatctgtccaagggccccaatggaaagactgactatagacagtataagttagtattatatatgtcagatcagctcttccactcgtctatgctgtccttagatggtgaatctcctcatgaggtttaccctacaattaggtagaaccagacaagtttacctttttatgtttcaggtgattactgttcctcagcagcagccagtaaaaatgatgtcttttgggaaagatcacagaccgccattcaacaaaacaacagtccagtctagtgagcaagcactaacctttgctgaagctgcagtgtcgcagttgatcgaagtggagcctgccatgcccactcataaagcttcagtttcttcacgcaagttgcgaactctttatgaaacctttaaagaagataaaggagatcctgaacaaggtgacatcgtatcttacagcacagcttgtgagaccagtgtctcttcagtcgctacagaaaagaatgtaacttcaaccacagaagttagtgtgcagtctgggtctgaaccgttagataaagaaaaaaatgagtcaactcctgggaaacagacatgtacaaatgaattttcagccactcttgctggtaatagaaagtccgtgacaaaaactcgtccagagggtgatcagtatttaccactccgtgaagagcaagcctatgctcaaacacagaattcactcttctattctccatcttccccaatgagcagtgacaatgaatcagaaattgaggacgaggacttgaaagtggagcttcaaagattacgagaaaagtaaggatgctctctcttctgtaacaaatataattgtttaggggtttatagaactcagtttttgctttgtagctaattgaggattggtggcatttaatgattaaaacttttctatggtaaaactataatgaattctattataaaatatgtatgcatactaaaaatctttgtgtataaaataacttttactttttaaaactgttttgtgtgtttgggtgttttacctgcatgcatgtgtgtgcagtgcccatgaaggtcagaagaggttgttggatacccccctagaactggagttacagctgttagctgccatgtgggtgctg

SEQ ID NO: 36252 - DNA, 1961 bp, Mus musculus
ttaggtgcacaagtaaatgttgcctgtgaaacttgcttttttgccttgattctttgtgttagtgtagattctcagtctggcttgccttttctgtcctagcactcaccatgcatgtgggatgagaggaaccatcactctgccaccaaatctctgcttaagtgatgacagccatgcacctgtgtgtaataaagttaggggctgggggatggaaagcaaagagagaaattaaattggtggcaatacaggacttggtggtgggagctagttttcaaatgtactgaggtgagacagccccagtgcccccaacttcatatgtactggtgatattttcttactcagtgcctaaagggctatgggttgtaattgctttaactaccacagtgaaatacttgacctcttagggcagtgacccatcttcaaaatgttatcagactgcctggtatttacagtgacagtttgttatcttaaaatggcagaatgcatttcatttggatcttagttggtagtaagcttttagataattgcttatctaatctctgtagtttaatggacttgactctctttgctgtattttctaagcattgaaaattctcttcccccctttaaaaaactcagcaaatgtttgtaactggatattccttgtttcacatgtttactgtgtaacactacatttttaatattagtaaatactatatttcagtcgtcatttataagtacattcctgaggtatatttgccatcaatttgtgattcagttacctcatgttttctttgattaagaaaaacctgagccttctgaggtggtatgcaagccattttctagaatagattggttttttttttaatctgtagttaatcagggacttattttccctccctttatttagaagatataatagaaaggtatgtatatatagaaaagacttttgatttggtaaataaaattctagggttaaaatttaaaactctaacccaaattatgaaatgaaaacactcgaacatagtaccagttctttttacataaaattagtgtgcaattggtatagagacatactttcagaccaccctggaaagagtctcttttatatgtgtatgaaggatgaattcaaacattgatcagggaccttgacaactatcatgtgaatgggcccacagtagtaatcaggttaaagtgattttccactgagatggttgaaagaatgtacagatcaacagctccgattctgggaggttctccgtgaagtaaaacaacccagactgttaaaaagctaaaggtcaggtgagaaggcaaggggaagactacactctgaagggacgatgcatgaaaatgcacacttggcacccttctagcttttttacattgtgtttcttcccactataatttaagatttaaggttgagatttgtagtctagacccctcagcaggtagagtggatacagtgactggtcagaaagtgcagttgcaggtctgtcatgctcaatcacttaacgctataatgtgtttcctgcgaatatcaagcatgtagaccaagtgcagcatgggagccactcaggaagtttatgaaattaaactttcatgcataatttaccatgaaatatgtagatttcagccaattctcaatacttaacatttagttatatatgtgaactctcctttcttaattcgggaatgtagcattatatagaatgctgttaaacttaattttaaccctttttaacttttttttttttttggtaagccaagtgatctacctttcagcagttgtctggttttgattcgtcgaaactgtgatttttattttaattactatccaactgttgttaaatattttgtttcctggaattttgttttgaaataaaaataaaggctgtgttaaatgagtatgtcaccttattaaaattctgtcatatttactgcaatcaactggcttaaattttttttcaatcaagtatatataattg

SEQ ID NO: 36253 - DNA, 1099 bp, Mus musculus
aaaagttctggctttggttttctgagtatttaatgtgatagctctgagtatttaatgtgataaacttgtatgaaaaatatgggattgaaagataagctgcctatgggttcctggtttttgcctttaaggtaatgaaaccttggtacctaatcagtatcctccttactctctcccctaactcacctaccccaggattttgtataccacctctagctctggcctgacaatcagataggtagatgttttcagggaagtagatagtgttggtttgggttattttattttgtttttttattttatacacttaaaaaaaactacaatggcctttgtactgggagattcaagtgagtccgaaaagtactgggcagatttttcctgcctcccaaccagtgcattgtttataaaatagaagctatggtgcagttcactctctgctgcccacactctaaaagggtgggaattaatgttatgaaactgagtacaaaagggactcaaagactttatgtgtgtgtacatgtgtataggtgtgtgtgtgggtgtatatatgaacatgtgtatctatatgcatacacataccctttatataagagacagatctatttatctatacatattttatatatataaatgtgtgtatacagatatatatacacatacatacatacatggtaaagttccagaagatttactgaatttcccagaaatgcttccactgctatggaatggtgggtttcaaaagaccatactttaaatctgaaatccttactaagtcacagcctatcacaattatgagaagatgggctactctaaatcagacacagagtactttccagagattgcctgttcagaacaacaaatacttcactttgaacagagccctcacatcccatatggtgaaaacaggaggttgagatgggattgggaaaagttgcacattttttatgaaggtctggagatagaaaagggatcggaggtaatttccatttgaaaaggctttcagccaatttggaagaaatgtcttttggaactccaggatcaaattcgcttctggcaagaactaactgacacgaatccaaggagggaaaactcacattggaat

SEQ ID NO: 36254 - DNA, 1572 bp, Mus musculus
actttgatattcttgcccaagaaatataatttcttcaagaatataactgactagactcctagcagggtcctctatttttggggaaaaaaatccatgcatcttaacttacaatagatccttggtgatttttttccagacaaccagaaggctatgtttgctgtctgcccattcgtctcaagaaactaaatgtcttgggctgtttaacccaagtctaacccagtttaagaaaactcacaattttcaggggataggagccctggtatgctttgccccttgcccagacatttcttaaataagcctaataaagatggcaagagtatgttccatgccatatatgagaagaataagaagaaaaaagtatacaacacttcctctttgaaagagctcccctgatttggttccctttctgatcttggacctactcatcctttcacaataccttgaaggttaggccttttatatccagtaagggaacaaattcatagagaatatagatggcttagaatcaccatctaagccacagaaggatgaatcctttggagctctaaaagtaaccagaatcactgagtgagtgaatggttagctacatggacagatactgactaggaagtacttggagttaaatgttagagtatcttcagttgctgtttctgtgcattgtaagtctatctgacacagtcagatgacagtattgttaactcttatgtccttctcacaacaggaagatttcttttgtaactattcactgtgagaggtaaagttgctgctttgacagaaatgattccagtttgccaaaagacaagcttttctccctttcacaagcctctgcttctccctagcctggcccaggaggaaacaactttgaattttgttttgattgagcatttggggtttgggaagttacaagaacgaactatagaggattatgttcctatgtacccaccaaaacacacaatttaaaagccaggtttgttactgatagatgaatgaactttttctaattggaagacaagttgggggcctttgctgtacctgcttgaggttctacttctgattctcactggctgctcttggacaaagtcatcttggaatccccagaaatgactgctttaccgtgtatggacacagcaaaaacaaaaacagaaccctaaaccggttttgtgcagccactgattgctaaggtcttgcagttcttctgtctgtgtgtctttgggtcagcctgtaactcctgcctttttaagtgactgatcctgacagacttctattatttaaatcattttcactgtacataggtaggacttcaggcatattgaagccccctaaaatggcactttctttggctagggacatttgctttttgtctccatctgaattttctgacattgttggccaaattaccctaatacttacattactgagagagagagagaaaaaaaacagacaagtattggggggaggagatacaaaaaatgcttatgtaggatagaaagaataagagtagccctttgggtatgatgattcagtcctttgaaaccttagaaggcccctatgggtatacaatgccaccctttg

SEQ ID NO: 36255 - DNA, 1301 bp, Mus musculus
gacaaatctttcttttaagttttttatattgaatattttgccatagcaatgaaagtctaatacaaatgtgatacagggatataactatttttgtctgaaagaatagctagttgttttagcatcaggatttccttctccaaataactgtttcagttaatatgtttttttctatagtatttaagaaaagattgaagggggctggagagatggctcagcagttaggagcactggctgctcttccagaggtcttgagttcaatttccagtaaccacatggtgactcacaaccatctgtaataggatctgatgccctcttctggcatgcaggtgtacatgcagatagagcgctcatacgttaaataaataaatctcaaaaagaaaggaaaggaagaaagaaggaaggaaggaaggaaggaaggaaggaaggaaggaatgaagaatcaaagaaacaaagaaggaaagaaagagctcttgtcctttcctctgccatagtgtacactaagcctgattcggcttctcgccatgtcttctcacaagactttcagaatcaagcgattcctggccaagaaacaaaagcaaaatcaccctattcttcagtggatccggatgaaaactggtaacaaaatcaggtacaactctaagagaagacactggaggagaacgaagctgggtccgtaaggattcacacaatggcaagactgaggatttatactgaattgtcatcaatcagtcctaccagatggatttcaacatttttaacctggagacttgctcgtatcttaaattatgatgtttgtccagtaataaaatatagaacctttcaaaaaaagaaaaagaaaaaagaaagaaaagaaaagaaaaaggaaggaagaaaagattgagtagaagatgatatgctactagtttgatgtcaacttggcacaagccagagtcattttggaagaggatacctcaatttagaaaaggcacctactagattggcttgcgggcaagactggggtgcattttcttcattgatgactgatgtgggagggcccagcccactataggtggtgctatcccaggggtagtggtcctcagtggctctaagaaagctagctgagcaggtcatggagagcaagtgagtaagcagcactcctccatggcctcttcatcagctcctgctgtagggttcctgccctgacttccatacttgatggactacaagctataagatgaaaaaaaaaacacatttttttcttttttcttttgtttttttttttttgttttgttttgttttttgagacagggtttctctgtgta

SEQ ID NO: 36256 - DNA, 2683 bp, Mus musculus
ctgaccaaaggcacggactatctccaactccctttcccacttcccctatgagtatcctaccttctttttccatatccataaatagcaggtaaatgggagacatttccaactgacaagaaccttttcctgctccacccacatatttcacttacaccttgtctttattcttttccactgctcctctatatggaaggaatgaggaggagcaacataaagggagtctgggcctgtcagtttcctcagccatggagtgagaagcccagtgctcaacattttctgcacctccagccctgtctctaagcctgcccacctccacccattcctaccccttcctcacaaccgatggatataccctaccttcattcttgttcctgatagaaggttgtggtctttatcttcttttacctctttttcatgacaaaatgaagagggtctttatgaccctattatgggacaactccagagctggcctagaaaagctgactttatctgtctttgggggagggggaggagattccttttacttttcgaggtgggaaaaaggacagatacccaagcctttgaccatgattgttgcttagcccaccagaggaaactacttttgtctgactgcaaatgaaacccctatgatgatcttcaggaatttgcctgtatttttgaggccctgtagaacattatccccatagctataactgggttcaagcaggtacaaactcacctcctagaaatctgaagtacctggcacattgagaactatggcccctgccaccccacaaagcacagcctggaccttctgaagagggtgtggtgagataaccctgaagggtcattatcaggaacttccatgtttctttccccatctaagcttagtctaaagaagatttcagtactaagatcttcacccctgggactttccacttccagaccacaggccaactattcaagcatagtacagataggctattgaagtctgaagttagaaacaatgcccatatgtgaagtagcagatattctgatccgcttttctctgctttcctttgtgattgtcactattttccagacaatgtccccacctccctcttgtcttgccttactggcaatctgggcttgatggagactgccccttctgaacaacccattttggcactgcccaagtgggagtgtcctctaccttccactcgtcctcatcccagcttgcctagtgcttctggggaatttaacagctatgatgcagaccacagggaatttgtgaggcctctgtgttatcttttatgtttgtggcttatctttcttttttctatagatgtatcacctccatccttgttgggatggggggatactttagcatatttgctttttctaccttggggacccccaggggccaagcagtcctcctttagtcacaccaaaggcaaaaggcctggctacctcccctttagcacgtgaggtccctattcccctcctttctactcagctttgcttatcttggagatttcaaggcagcagtagggaagtaaggggaaagcaggagaagctcctaaccctgtatgggcaacttcctgactaaagactgactgttgtcaccaaaaacaggtccctagccctttcacccactaaaactccctcttgatctttcaatggcagctaattgctagcaccctcaccccacccattccaggcctcttttccctctgtttctttgttagaaggttctgtggagctgaaacccagcctctaatggggtttgtttagtttagttgggttctcagagtctcctgttattttgtgttgtttccaatgaaaagcaagtttaccctcaaagttatgcttttccaaagaagctagtgtgttagtggtgttgttgctgttgttgctgttgttgttgttgttttgtttgttttgtttttatgtttcaggttctaagtgaagtgaggtggagaggagttgggaataaccaaggtttagaacatggtgagatagttaacctctgatctgcaatccccagcagagagttggggtaggataagagggcagagaggatttctattcacctttaatatatttttacaaaaaagcaaacaatttaaaaacaaacccaccgcttctgtacatgtctaaatatatttttagaagtgggtaggattgtgatttctgatgcagggcctttttataaataggttagagtagcctcatccagatttctctgttgtttgttccccttgttttttcttatgttgtgttactaatgtaatttatatattttttagatctccctttcctgtagagataaaagtgatttatcttggcaattttgttgcttgacattattattcataggggggtagggggtggtcatgtggtgggggtggttgtggtggtggtggtggtggtggtggtggtggtggtggtgctgataaggtgcagtgttcagaaagttactttccttttgactatcattcatcaatttataagtggtcatttccctggttatttaccagcattatatctgaaatatgcatttggtaagctcctgttcttaaggacacaattttatacacataaaatacttaattaaaagtaaaatagggagaaaatgaaaggtacaacaattcagtgttccttagaagttcaatgagatagttttcaatcattttcatgagctacttcttatgagcatatactg

SEQ ID NO: 36257 - DNA, 1166 bp, Mus musculus
aaacacacacataaagtaatttgatttaaataacaactttaaacatcttaattggggcttttggtactttctgatttttcacttttgtacctactcatgcaatatagattaataatgttaaatgtttgtgtacatctttaaaattttgcctaaattcccagaccccccccccccataactagaggcttatagtgagttttccaccccaagttatcgaaaaaccttgcatacttaactgtgtcaataaagagtttgaaatctttataataggagaagaaaaaaagcttttttgttttggcttagtttggtttggggtttattgtaacggggaatgttggttagttttatctaaagatactctgccattttctgtctaataaccatatcatcgaattaacataactccagtgttacactaggtatcttgcatactcttcatctaatatttgtatttctaagactgtagagctgtagaatatctgtaactttattttctcattactttggggtttttgttttttggttttttttttttgcagatcttaaatcagaaaactgaaaacatgaaagtagacaggactaaactgaaaaagacacctactgaagctgtgagtatccaaatttgctttgtgcattttctttatttcaggaaaaaaatcattgtgaccagttcagcagttctgatcttccaaataagtatgtccagttaatacaaagtgttaactatagtaacttgtgaaactaggaggaatatctctgtttgtctagcatgcatgaggccttgggttgcatcctgaacactaccagaaaaaataatactaccttgccattttaacttactttgattaaaaattagtagccaagtgaccagtggaaaaaggaatagtgaataatactttaggtatttgttccctgaaagggactctcaggctacaatataagcattgaaagacagtatgacaatggaaaagagatgtagaattaaaattgactatagctaatagaacttaagagttttttgttttgttttgaagacaaaaatggtaagttcattgacttttttattagccttttattttgtattttgacattggaatatcagtgtttttactaaatgccatatattgagcatattaatattgtttctgtaagttttcatttgattc

SEQ ID NO: 36258 - DNA, 1239 bp, Mus musculus
attacatagtgattttagttttatccagttatgtgctgcaacatattggtgaatgttctctgtttggaaaaaaaagaggttactcccaagcttgtcgtactttaatagttttgagtaattgcacacagctgttgttgatagttttagtttctatgtgtcctttatatatttgttataaaggaaataatagcatacacttagattcatttcacaatgcttagaaatataaatttttagtcctacatatgtattatagcatgtttctatcttgaaattcttccttatgagatacagatataatatcgagctgcaattttcagtgtttacagttattgaactttctagtcagctgttccttggatgcaggattatatattgtaagagattgacttatttttgtgtattgtggctcaataacttgatagcttttaatgttgacacacattattacattaaaagaatttcttttgaagtttttagtgccaagtacttgatccactaaactttgtcccttttttgtttctatagcatttgacaactttattggcttcctctgatatgcaagtggtgctggcagtccttaaccttctatatgtatttagcaaaagatcaaactatatcacacgtcttggatctgacaagaggactccgctactgacacggctgcagcatttggcagaggtgagtctttggggaagatatcagcatatggttaaacaggcatttcttgttttgccaaagtggattagaatccttttgttaactttctgaggtttacaagtatttgtgacagtgtaacaaagtttcaaaaagcacgagtattctcaactattaattaaatttgaaatatttcatcaactctgctcaagaaacaaaattcttgtttcaaaactgatagtgctgctttggagaaattcagaataaggattctatgtgaaaaagaagcataccgagagaaaaaggttagattcgaatctttaattctgataaccagttttctcatttcggaatttaaataagaattgtttagaataatcggagaacatttagtgctattttttccaaattggatattttctttatttacatttatgatgttgttctcccttcctccccccaaaaaaaacccgatgttgtcccctttcccggtttttctctccagaaaccccctgtccccttcccccctcgacctgcttctatgagggtgttccccccactcacctacccactcccatctcc

SEQ ID NO: 36259 - DNA, 1550 bp, Mus musculus
gtgctgagagggatcttgcgagctctacatctggaccagaaggcagaggaaacactggggcctgactagggcatttgaaaccttaaagcctatccctggttacacacttcctccaaaaaggccacacttctaatgcaactccctaagcatttgaaaatatgagtctataaaggccattcttattcaaaccaacatgcaaataatatagaatcttagagagctcttggtttatgtcaagaaaacatggttccaccatggtgaaggaaagggttaaaaaacctagaatggtgagaaaggccagctataactaaattccagcaagtatgaatttatacatatggaatgtagtagctggctagcattgctgctttgtactcttatcttgagcagctccatagaaccataaaatagattgcattgtttgttttttcattaaacactttataaacttatgaccataagcgtggtgttaactctttttttttttttttctttaccaagagctggggtggaaaggagaatggctttggacttgcagaatgttgcagagacttgcaaatgttggtgagttaactatttgggatatgataaagtcttgttctaagcctcacttaacaatgaatgtatgatatataaattgacacttgacattaggacttttgtagaacttgaaaaattagtgcataatatctttaggaaatttgagctattattgttcctgttatagataaaaaagtctcagtagtgtgtgttcatataaccagttctgaaataagttgaatttatttaatcaaatcccagaaagctgggaagagtagtacttccacatctgtatttgggatatggcacgaggaagagcacgacttcaagaccagctttgactacatttacttatgtactcacacaagtatcagaactctgagcagtgttcaggaatgactgataggaaattttttttttaagaattatttattacagggatctgtagacaaatcaagagtagttgacctacattttatttccagcaccctgtggcaactaaaaacatttgtaactccagtgccaagccctatgattagcctcttctagcctctataggcaccaggcacttacttggcacagcagatatgcatgcaggtaaaacactgatacaaataacattctaaaaatagttttttaaaaacttaggtatactcttaccttgtcaccaattctcttaaggatttaggctatcctcccttctgctttctgtgcttcaagtagagcctagattgtcatattcatcattaagtagatatgatcaaatctaactaatttatcttctggaaatgtttatcccttagtaggatggttcttatttttagttgcagaaatctacatattaaagcaggttactttcttaccttagctgatagatgatcttcagtaagtagctgtgaatggatgttggtaataagggaaatatgtcttaaatcttactcagtttggagtttcaattttgagaacatattttaatgaagaattctgaagctcattctgcatgttaagac

SEQ ID NO: 36260 - DNA, 1391 bp, Mus musculus
tttacccttttgtgctgattggaatgtgtgttatacagtggtggcttaataactgcatttctaccaaagtctttgcttttcttttgcagtctattctaatgccttgcaagagtcagcaaacagtatcttgtataatgggttgatagaggagttggtagatgtccttcaaataacagataagcagctcatggtaagtatctattaatatgtacctatcaagttttatattgcatatgccttctgtttttcttaagaagtccaaaagtatcctagaagtggagcctgaaccttttacttttttctttttggatattaaactgtgaaattactgaataccaaatacacattgttattctctactgaccccattttcctcaaacagttttaataaaattactgaaaatttgattttgagatattagcaccttcgttcagttgtccatttgtttttgacactgtttactttgtcctcataggaaattaaagctgcttctttacgaacgttaacatcaattgttcatttggagagaactcccaagctcagcagtattattgactgtactggaactgcctcctaccatggatttttgcctgtacttgtgcggaactgcattcaggccatgattggtaggtttgcatggtaattatttacctaggaacatttcatcgtttaacattgtgctaggtaagtaactgaggaaatcccaactttctttgtagatccttccatggacccatacccccatcagtttgccacagctcttttctcctttttgtaccatctggctagctacgatgctggtggtgaagccttggtctcctgtggaatgatggaagccttactaaaggtactctgcttttgctttctaatataattgtgtgaaaatcaaataagagagggcagatttttaatgttttacagtgagtaaatagcacagaaagtttatcctaaaagagttatagtttatgttctagttgccacatgtatctattgtcaatattgggactttttgtaatccagcgtaatttggtagactggaggccctgggtctagacagtactacatgcatagtagtgtgacattatgcatggccctaagaaaaatgtatgtaagagtccttgtaaagttttagtttaattataacaggatttagattagttggttgattggcagtaggtattttgaggcaatgggtcttggcctctctggcttgcaataaaataagctgtatatatttaatcatctttatgaattgttatgcatgtggcctcaggaggttgaatatagtccttgaattcataactttattatttgacaaaacattcagcatatgtctttatcttctctccagtttcatactatgctgactcaaggggacaccaatactata

SEQ ID NO: 36261 - DNA, 2171 bp, Mus musculus
gttaatttgatgtgactcaatacaactttatttccttttcattttcacatctacaagtatatagtttttagaacagagagagaggagagcacaaacacattctgcttttattgttcattctatgtatcatagccatccttccctatgaacatcagtgctttttatatttgttaattaacctctgttagtagtcttgacttactacctccctcttagcagtaacatacaaagttgcatgttttacatctcactcagtggacgaagttttctcagaaatctttcttttcttagtaccttttattctaattagtttctttatcataacttgtactttagttgcagatgtaactatggaaagcagtccaggctcgtccatatctatggagcaccggctggatgttgaattaagggcatcaagttccaacagcagcactagcatctctggccctggcccgggtcctggccctggtccgggtcctggccctggtcctggccctggtcctggtcctggccctggccctggccctggccccggccctggccctggtcctggccctggaccccgtcctggtgcgtagacacatagatacacagtcttttacagtgactgacttattaaactagtgaagaagagaacattacacggcacttattggtacatttgaggataatcttataagaacatgtcttgcaacattttatggtcttctgttagttcacacagtatcaaaacagacatttcggagggcagataatatccaaaagtgaagtttgaagttgaatctttttactctacagtatttctgtttttatctttttctttttgttcctctgtctgtctgattttaataccggtcatatgctatctttggtgatttaatttcagctttcagaatactctctctcatgtccagagatctcactttaaatgtctgctagttttgctttagtggatatagacgggtctcttagtacatgttttgtgtgcctcttcactgtgatttaataatgagcacaatatgatacttttttctttctcccatgttaggagttcagtgtattccacaacgagcagcacttctcaagtccatgttgaatttcctcaagaaggccattcaagaccctgctttctcagatggcatacgacatggtattttgattctgtatactgttttctaagaccacttggttatccagattgttctttttcatgttttcttgatgtttttctaaagcatacttagtaaactgatagctttttgttacttaatatgtttcttagacatgagggttacttacacaactccacttcccagctttggattctgatctcttctatcctactgccacctctcatagtctccatgtctgttcttattttgaccctctattcaagctaactgcatgaataaactaaggcgttatatgaaacagaggccatagacttgatcatttatttactacagtataacatattgctacccatcacccttgatcttcgtgcctcacccagacttatcatatgtggtctttgttcatatttcttttagtgatggatggttctttacctacctctctgaaacacatcatcagcaatgcagaatactatggtccatcactcttcctcctaggtgagtagaattgaagttcgggctaggttgaatgttctggcatacatttataaagtacctggaggcaaaaggcagtcagttctcttgagttcaatgccagcttgctgcatgtgtgtgcacgcaagcttttagaacttttttttaatttctttttttatgagatattttttcatttacaactcaaatgctatcccaaaagtcctttataccactccctaccctggaccctgctttccaacccacctactcccacttcctggtaaatgctacaaagcccattgttttatcccactacgcactttggcatcacaaatgcaagttggaactccatttaaaattctataaagcaatttagggggagatgtagaaattgcaatttctttgaacatagtggagtgtacattgtacaaatacattatgggcagtctagagatttgtatttattatgactttacctttttgctaatgaaacagtttatgaatctgtatttctatcttgtgatcttgcagaatttactagtttggttttccctgttaatg

SEQ ID NO: 36262 - DNA, 1136 bp, Mus musculus
tacattaatacattttttctatccctcaaagatccctattgttttgattcaaatcctgattcctggagttcattttatttatattataaggatgcgtgggaactgtcctaacaaatggagtgtatatacagttaagacatagacctgtttctgccactaattcagaatgttgctctgaacaaggcatttagcttctctttgctttcaaattgacttctggagtggttaaaaaggtagaatgggaagggttccttattttctggatgagtatgtgctaattatttgtccctgttaattgaagtggtattacagaaaataactgatgtcttgcaaatacgttgtccctatcctgatcctgatgaagtaaaactgaccttttacttccaagtgttagcctctaacttgtttttaaaaaactttcatcacctagatgaaatttgtggaatctattttgagcaacaatacaacagatgaccactgtcaagaatttgtaaaccagaaaggactcttacctttggttaccattttgggtcttcccaatctgcccattgactttcccacatctgctgcctgtcaggctgttgcaggtgtctgcaaatccatattggtaagaaacatctagcgaaatattttacatctctgtatgtattttcattgtgttctcgcttaaggacctctagttaaaaattgataaatttgtgtgttttatattttatactatttcccatagtaaaattatttattttctttgtttttgcatttgcgtgtagttttgccatttgaattcatatgcgtctaaattatttccaggaaagctttctagctttcttcatgttgttatggtactgtttttttgttttaatatgcgcattcactttgcagtgttcgttccttttccccaagctttattagtcataaattgatatgtaatttattgcttaaaatttgccaaaaacagtttctttatttctacaacacctttgatttttgcaagttacttgttcacccctaatgccttcagttagtaattatcattctatttactcaacttgaaagtaccttatgtaatagcattgtatagcatttaagagtgttacagtgacactaaatatttattaattttgtcagtttccttt

SEQ ID NO: 36263 - DNA, 1176 bp, Mus musculus
ggtagctaggattaaaaggttgtacccccatgtccagcaaagacctgggtttcaatcctcagaaattctgtataaatgcctgacaactttgcacatgcttataatcccaacactgtaaaaaataggtgcatttctggggcttttgggctagccaaaaattgtctcaaaaacttaaggtggtcagcacctgaggaacaggttgttttctagcctccatacgcctagatactcgtacatgtggtaacagaagtacatctcctggctctgtgtttgtgtattcactatttttaccatgtttatgtctcagtaatttattacaaaaagttgttcaacagttccaaaactgggtaagagtacgttttctaccagctacactataatgtagcccagacattgctcgcactcagtatttcttgcctccaaaaatgctgggattataggcagatgatatcgaaccaaacagtaaaggttgatattttaaaaatatagtatttttaaagtataattgtttgtagacagtctcaaatacttatcctttggttgcagagtgaaattcgttctatctcagtaaaccagtggggttcacaattgggtttgagtgttctgagcaagctaagccagttatactgttctctggtgtgggaaagcactgtcctcctctctctatgtacccccaacaggtaagagaatgctcatttctcttaacatctctctttgtttttctaatagacaaagtttgaacagggtggatgagtttgattaaaaaggtccagttttttatccttcctaccttctagcctatggatttaactgacaaattataacatcctctgaatgtttaatatgatttcctggagatagttgtgttagcacaatgcaaacaaatcttgtttgttgcttcttcaagaatcaaaatttttttttattgcacttaggatagcttaggtgctcttagaggtactgcccaagcagtatataagtatatatgcagaatataaattgtaatagcacttaattctgtttgttttggttttttgtttgtttgattatttcccttgttgtagcctaccatctggatgtgaatttggtcaagcggacatgcagaaactagttccaaaggatgagaaggcaggtacgacccagggcggaaaaagatcaggtaactgtaagaaaaat

SEQ ID NO: 36264 - DNA, 1641 bp, Mus musculus
acaggctattaaggaatgctcagagtgtgagttttccctagggaagagcgtaaatggtcagccctgaaaaatttgcatacaattaacattatacagattgaacatgttatatttatcaatatatgagtatacatgtatatgcatttatagcaacaaagaaagaggccatgaatttgaaagagtgagtagtagtatatgggtgtagtattggagtgagggggagggaaggagaaagtgatacaattataacctaaaaaacaaaatgtgtacgaagaggataaaagataaggtacaagtgtattagtgatctttcaatgtaaaatactagttaatactctatttacatgttttgtcttatttgaatttagaactttcaactgggctctatccatgggaggaaaagttcctgtttctgagggattggaacattcagatctacctgatggtacaggagaattcctagatgcctggcttatgcttgtagaaaagatggtaaatcccaccacggtgcttgaatctccacattcgttgcctgctaaattgcctggaggagtccagagctttccacaatttagtgcccttcgcttccttgtagtaactcaaaaagtgagtattctacattttaaaaccaaagggggaaaaaaactcttcatgctaggtagttatcactacactctgtccatattaaaatgtgaattttgaaaaacaaatggacttggttttcagattagcttttttttttaacaaaaaacttgaagtacatgcttctgattggttcttcttgttgacttaaatgttcccaccctatcatacccaccatctacatgccagtctaactctttgttgttgttgtaactgactcattgtggaaggggcatgtctgtgagtcttattttccttctgaggatttgaattgatggggaaagtcatcatacacttttcaaatggcttacaggcagcctttacttgtatcaagaacctgtggaaccggaaaccccttaaagtatatgggggaagaatggctgagtctatgctggccattttgtgccacattctccgaggggaacctgtgattcgagaaagactgagcaaagagaaggaaggatctcgaggagaagaagaagcaggccaggaagaaggtggctcacgcagagaacctcaagtcaaccagcaacagctacaacaggtagagtgctcagattctacactttcaccttatatatagactctaatgctcaaaaatttttgatttttaacctcgtctcactgtaggcaagactgacttcaaattctgagagttatttgccactcaacttgcttgtaaattttctaagctttcataccactgctttccttggttcttagtttctcaaagcatttttttcctagtgaggaaaggtaaaaggtatggtcccagtactttgtgcagaaaacatatctatattttcataaacatattaattacattgttttcaggaacctgcaaaaatttttttggtagtactgtcaactactttctggttaaacgataaggcaaactattatagctaaatatattctccagtaaaagacttttgaaaaactattcactaaacctgtatgacgttaaaataataacattttgaaaaataaagaccaaaa

SEQ ID NO: 36265 - DNA, 1947 bp, Mus musculus
tatcaaagataatttaaaacaaaaggaagaataggttgtcaagataggaaattgtcatgggtttttggcttggaaaaagaccaagaaatgaagaaaggcctcttgaaagtatattaaatgcccagtacatttttttcctgcattagttttaagcagctgtctactgatagctgctgattattttgacaataaaagttgcaggaaatatgaagatactttatgcatttgcattttatttagtacctacagtccaacagcaacaactggcgctggtttgatgaccgctctgggcgttggtgtagttacagtgctagcaacaacagcaccattgattctgcctggaaatctggagaaacaagtgtaagattcactgctggccgacgaagatacactgtccagttcactacaatggtgcaggtacatgctcaacttataatgtaaactttattgaaaaggggatagtcctctcaggctaaggagtaggactttgttttttaaggacagctttgttttgtctgaattcttaggttaatgaagaaacaggaaaccgacgccctgtgatgctgactctcctcagggtgccacgactgagtaagaactcaaaaagcagcaatggacaggaactagagaagacactggaagaaagcaaggagaccgatatcaaacataaagaaaataaaggcaatggtatgtgccttacattttgcatttgtttttccttccaagtaagtggttgctcttgctggatatatagctcaagctagtctcattcaaaatccttctacctcaaccacccaagtagttggaattagaggtgtgcactttttgtaccatgcatttatttttaatccttttttttgttttaactctgaaagaatggatttgtttaattgtatttagtacctttggaggccagaagattatatcaagtcccctttaagccggacttagagatagtcatgagctgccccacagtagagctgggaactgaactcagtcttctgtacatgatcttattcacagagccatatctccagccccctcattatgagttatattaacatgatttaaggtagtatggcttattatctgaaactcaaagagacagagagatggtcttttcctaagacctttacatctggtcttagaattaggtgtgtttttcagctcaagtgatggctgattattttggaaggagagagatcgagtgaaatgtcaaattgaaaacactttttttttccaatttgtagatatccccttagctctagagagcacaaacactgaaaaagaggcaagcctggatgaaacaaaaattggggagatcctaatccagggcctgacagaagatatggtgactgttctaatccgtgcctgtgtgagcatgctgggagtccctgtggacccagacactttgcatgccacccttcgtctctgtttaaggctcacccgagaccacaaatatgccatgatgtttgcagaactgaagagtacacgaatgatcttgaatttgacccagagctcaggtttcaatgggtttacccccttagtcacccttctcttaaggcacatcattgaggatccttgtactcttcgtcatactatggaaaaggtcagtatttttgaagtcttgtgcctgtctgtatatttgttttttttttttttctttaatgttcctggtatgttgtgcactgatgggcctttaaccattgtaaaaattagaaaataggttcttatattttagaactaaatgaatatatcagtggaagaaatgaaaaaaattataaaaatatttacattaagtataattaagagataaatatcttaatcagcaaatctttgtacctcctaaagacttttgctgaattcttattcttcttactaaatcattttcagtaatcatataaatattagtaggtttcaccctctttcttggaacattagaatttt

SEQ ID NO: 36266 - DNA, 1106 bp, Mus musculus
gtataaagtataaatcatggctttacatataaagcaaaacttctgtattttaaattaagaaatataactggctagataagccagatcttctaacaattacaatatgctatactagataacatgagtagtttgttaaaatacaatatccccaaaagattatatatttctaaaagtttttaatcgcaggatactatacataaatttgatagctcttttagctgtcatctcaaagtgatgattgactaaataaagcatgaagaaattgttctattatgttaaatataattgaactattatagcttaaaatcacagcatttgcggagtcttagagcctacacttaaatgtggaagctatatagcatgtgtaatcagatgcacctcaataacattcatgtaagaatttagttttgaaaacctttatgacttgtatatgagacttattttaattgtaaagagtcttgaagaacaagcgtatctttcattacttaaattgacaatgctttttactaggttgttcgctcggcagccacaagtggagctggtagtactacatctggtgttgtatctggcagcctcggttctcgggagatcaactatatccttagagtcctaggaccagctgcctgccgcaatccagacatattcacagaagtagccaattgctgtatccgcattgcccttccagcccctcgaggctcaggaactggtcagtttcatttgctactattctttcagaaaattctctttaggcagatattgagacattggttgagcatttgacttagtaaattctgtatgtaattctcagtaatttctcttggcctcttaatacaactcccaaggattcactctagtctttacctacaaagtgttcattttgatgtgacaatagaagttaaattaactgcagttggtttctgtatagtgcgatcattgaaaaacaattgtttgtttgggtgacagaatccaatgaaaagtttacagtgctacctgtattcttaccaaaaagttaatgcctgtatttcattgaggaagtaattacatttatatcaaattatggaaatattttactgaacagctagcctaaacccatggtaaacacgaat

SEQ ID NO: 36267 - DNA, 1225 bp, Mus musculus
ttattttactggccttactaacagcatattagtcaaagaaaactgtctttgcccttagtatgtggcatgctatattggatgcctacctacagcttaagaattttgtcaaatgagggagacggcaacaattgtaactaatggaatgaacacatacttccatgagatatagagagaccaatatttccatatgtatctagatggcacttgagttgaattgcatagtgtgtagtaggcaaaagaaaggagatggatatttaaagaattactactaattcattatttctaggacatgaaattgcataaacatcaggaaatagtgggtgcctggatgtttggtccaagccttcctactatgtcttatgcatattcatcatctttgtcatttaactacagtggtaattagtgatttgtacaagtggcctaaaatgaagaaatactgtcttcattctacctgtggcttggtttttaatgttattccagtgtaaaattgagtgtttacctgttttctcaggagcttcaactccagaggagactcgagaagggaagaaagataaagaaggggaccgtacatctgaggaaggcaagcagaaaagcaagggcagcaaacctttaatgcctacctctactatccttcgtcttctggcagagttggtgaggtcctatgttggtattgctaccctgattgcaaactacagctataccgtgggccagtctgagctgatcaaagaggtaatatttacagttttttctttctttgatattttggttatatcctagactgtgttggaaactataatactcattgaaaggaaagctagtcttttcaccatgatgtgaagcaatcagagtaactgcaaggaaacagttgatgaaatcttttgtatcttgtttggcttgacaaatttttagattcttctttatttgagtcatttttctgtttgtcactaacactgtagtattgctatgtaaattatacagatgcatatctctttggtgatgtaggcttaagaatattattgctgagctctagaacatgaatttatatagctttaacagatgctacctgaagtttaccagggtgtatattctagtagtttatgagagttctgattgtctcaccttatgccatcacatatttcattttatttgttccagttggtttgttagtagttttgtggttaggatttgcattttcttattggccatattttaatgttttttggtt

SEQ ID NO: 36268 - DNA, 2593 bp, Mus musculus
acttggaatttgtaaggagaatcagaagttcactgtcttcatagagactttgactagcctgagctgtaactacatgaggctgtcccaaaaaaaacgattaaagacaaaataaaggagtttggagatgtttttgtttggttaattagttggaatgggtctgggtttttttttccttgataatctaagaagtattgatatttgtagtcatccagaatttattctggcttctactcaaggatttctcatgtgcttgtcatagcttcatgaaatatgacatcgacttaacttttgctttactgggttttattcttaaacttaatggaaagttgaaaattctagactttgcgcccttttctctcttagcttccattataagaacctgtatgcttatgagattggcacctattatttctatccttagttcttgtatctttctttatctcagtcccaatatggccaacacagtcaatgctgctctaaaacccttggaaacactttcccggattgtaaatcaacccagtagcctttttggcagcaagagtgcttctagcaagaacaagtctgagcaggatgctcaaggagcttctcaggactccagcagccatcagcaagatccaggtagggaatcagaatgaatggactgcaaaaactggatgggtgggagttgttgcttgtggaattaaactgttctagcttattgttgtttacccgggaacttgctggtcttgcagatatctgtcataatggtgtggaaatctgtcccacaaggaatttcttcacattacagctttgtttggctatcctcacatgaagccaagtctttttcttcatcacacattcatttatatttatactctgagaatttgtaaatttgcctaaagacaaatcactgtgttcatgcttgcctcatgatgcccagcatataaacaccttttgattatttattgtgctggttggttgattgtttcaggcgagcctggggaggcagaagtgcaggaggaggatcatgatgtcactcagacagaggtggcagatggggatatcatggatggggaggctgaaaccgactcagtggtgattgccgggcagcctgaggtgctcagttcacaagagatgcaggtagggaggcagatcattccaacattcttctgttgcggtgctgaaccaaactcccaagtgttgtgggtgggtgagtactttagatcttgcctcaatgtggtcttcagaggagcacagaatgcttaacatgtgtttaaattgttttagttaaaatggggctggggacagagccctttgggtatggtttctttgatttacttggctctgatcattattgaaagttacttagcgctatcttatgccatgccaccagatctcactggagtatttaaataccagtcttctaaggattttaaagaaagcatggtaatttggtagcagtgggtaagaaattgttcctgtatatagcagaggatggccaagtaggccatttatgggaggagaggcccttggtctcgcaaagattatatgccccaatacaggggaatgccagggccaggaagtgggagtaggtgggttggggagcagggcggggggagggtgggtataggggactttcagagaggaaactaggaaaggggatagcatttgaaatgtaaatggaaaaaaatctaataaattgtgcctgtgaaccttagctgctggctctaatgtgatctgcatgtattcctagacagtgttaaaacactaacctggtatttgttgaccaggatacagacagtgtgagtgtggatttattggaagcatgtggtaggctctgtgttaatagcaccaattatgtggtttctgtgtaacatcctatcacatattatagaaacatatgctcccttgctggctttataaaagggtttccgtgctagcacaatgatagacttgttgtgtgcatccatatgtatgttctctttctctccaggttgaaaatgaactggaggacctgatagatgagttgcttgagagggatggcggatctgggaacagtacaattataggtgagagccccagaactgagtaaagcctcttcctttgtctcagtctctcttgggaggaccatttttctcatcatctgcttgctcagctctgcctaagggctcatagccagcctagattgctgcttgtcttgatgttgatgatcttaacagaaaagaaattaacaagttgtttataggcctgtaacaggtctgaagtgttgtgtatgtcgggtggcggtgagggtaacaatcagtatagatgataacatcaggcacaccaaaagtgtttattcatggaggcctagaagaggctgtaggatgagaaaatgcttttctttcagttcttcaatgaaatccaggggctttttgcctttgtgtcttaaaatgtaaaaaagagtggtcattccttaaggatggccccttttaagtctcaaatggaaaatgacaaaggtaaacaaaccagctgccacctcactgtgaaggtgtttatatttttattttactggtcaagaaaaccaaaggattaatggaactaggcatgtattcttaaaagatacaaagctttt

SEQ ID NO: 36269 - DNA, 1396 bp, Mus musculus
tccactttatcctcagccagtttttcaaataacgttttactactgcttgcccaaagtttgtcacttcttacttggttcgctttcttctcacccacctgctgtcatcgctccagattccctcttatcaacaggatgcagtcactagcaaaataggactggaaaggcaaggggacaccaacagacttggtcaagccctacatcgtggctcctcaagcacctccctggagccagcttccacatttcagcaaccctgctcagcgtgtcgatgcattaattggcactctcaggaaatttgggctggctcactaagtctgtacaccaccctagatctgattcttcctctcttagagtcagataccccatcgccttcccactcagtctgccggcctgcacagtggcctgttttctagctactcagtatagtcctccaatgtgctccctttgttttagattccatgaatatcctggaccctgaggatgaggaggaacatactcaggaagaggacagcagtggcagtaacgaggatgaggatgatagtcaggatgaagaggaggaggaggaggaagatgaggaagatgatcaggtgaggggggactgtgtttgggttggttcagatgacctcttccatgggagcacagaactacagaaaaacggacaatctgggttactagctagcctcgtcgcctccctccctcatgtgctcatgtggccatgacaccaagcttcagaaaacacttacctccagcaattctccatctcgtattttcccttaaggaggatgatgaaggtgaagaaggagatgaagatgatgacgacgatggttctgagatggaattggatgaggattaccctgatatgaacgcttctcccttggtccgatttgagcgctttgaccgggaggatgatctcatcattgagtttgacaacatgttctccagtgctagtaagatacaggggctcagctgggtttttacctattgattcttatacccttctctagggtaaaccaagcagaactaaagcagccatcaatctgatagaggacaccacttcttttactgtcttgacatcccaggtcaagggatgtctgaatccatctctctggatagcatacatatccttgcaagaaggaatcggaggaggctgctcttactatctccacctcagtaaacagggagctcttagagcctggacaacttgatgttttgcttgattgagaaaatgagaccaagtctgactacatgaggcacctgaatcacactgcagtgacagggcaatcaataatcttttatttgtaacgctggatctcaaaggtttggatggacatcgctgagcctggcattagggagtggattttatatattcactgttcatcatggatggaactgatccgga

SEQ ID NO: 36270 - DNA, 1712 bp, Mus musculus
gagtttttaccctctataggaacttatggtctgtaaggaattataagtaagaagacaccacatttagtatgctaatgcacagagtaaaggtatatctaacctgacctgttagactttagaagtaacatcttggactgagaacaaaagaacaggtgaggaagggaagcagagtcttctaggccaaggggccagcatctgaagtgcctagagacatcactgttgtcttgaaagtgggctgggaaaaggtaggattacattgaggtggtggcataacctatggttgtatcagatcctgaattaggtgtgagaatgagggagaaaggaaaaagatcacatttccatgtgagcaaagcccaggagacatggttctacacatgaacagccatggaagaaatttatttttggcactgaccccttttgcatattttccttgcagcagacattcccccatccccaggaaatatccctaccacccacccattgatggtacgtcatgcagatcacagttccctgacactgggcagtggttcttccacaactcgtcttacccagggcatcggtcgcagtcaaaggaccctcagacagctcactgccaatacaggccataccattcatgttcactaccctgggaatcgccagcctaaccctcctcttatactccagaggtgagtttgtgttgaagcagaatcaatgagaagttggattcaatgaagctcttaagaattataactgaacttcaacattgtcttgaccataaggataaacagtccctcataaataaggttgtgtgacccatagtaagtgaaacaattttaaaatgaaagagtgaatataagtgccttataaaggtgtacaacaaaggcattaatacctaacatggtacctagcatatcaaagcttcctagtgttcaaggaactaactaaagaataatatgcagttcaatctcgaagttatcaaactgacatgctaataagaatggtagtaaaggtttaggttcagtatgattaaaatctacccataatcctataagtttactagatgtacatgctcgatctcatggttaacagacttctgtggacttgaaagtgaaagtggtaccttaccattaccctacaggttgcttggtccctctgcagctgctgacattcttcagctgagcagcagccttccattacaaagccgaggccgggcccgcctcctagtgggcaatgatgacgtccatatcatcgccaggtctgatgacgagctgctggatgacttttttcatgaccagagtacagccactagccaagcaggcaagtttattcagtaagagggaggatagagttctttgattcttcttcagtcctaagaagaagagtagtctctttcttggagaaactacattttataggagccaaaaccacttggtgacttagccaaggacaacaactctgttgcctctgggtacctgttatgtagcaaaacttgtggcagaccatgggttcttttaggaaaataatgcagtttttaggtcaatcaacacttcataaagccaagaatttcactttattttgttctcttataggaaccctgtccagcatcccaacagctctaacccgatggacagaggaatgcaaagttcttgatgctgagagtatgcatgactgtgtttcaggtctgtgacaacttgaatatcagggtagtaatgagccttccggctagaatgagt

SEQ ID NO: 36271 - DNA, 1141 bp, Mus musculus
gcttttaggaggtttttttttttttctgagtagccttgacctatctatggtatgcaactgttcccttctacctggaacatagaaaggattgtactctctagatcattagagtcatatctctggtgttgagatacagatagtattgttatttagccctcattattatgatatgccatccaagaactgtttctgggaacagattgatttgagaaagattttcatgacttttatttgaatgggtccttaccaggctgcatgtgctgattggattcttcccatggtcattcgctaagttccccttaacctcgaatatcattctttccaataaagatgggactcctatgcctgacagctatccaacaaccccctcttcaacggatgcacctacatctgagtccaaggaaacacttggtaccctacaaccctcccagcaacagccagcacttccacccccaccatccttaggagagattcctcaggaactacagtcccctgctgaagaagtggcaaactctacacagctattgatgcctatagagttggaggaattgggtcccacaagaccaagtggagaagcagaaacaactcaaatggaattgtctccagctcccaccataagtgagtagaatgtcatctttaaaagggcataaaaaagaaaagaattgcaatctttgtaacttttctctgctttcttactttaaagaattaggagctcagaatcctcagtttacactccagctttcttagtagaagctcagatttcttctttgtgtcctcagttaattattgttgtatatcttaatgataagtactaagcatgccataatttatctaggcaatactcatttctgaactaactatcatgtcaggtttgttatttaacttctttgaaaataatgtttcagagttggtggtgccttcattcataaactgaaattctatatcattcagttttcctatcatttacatacctactgctcacttatttaaaatagtgcatcaaaattttcaacaaaatacttttttttaacaaggcaaactgaaactgacttcactataccataatttctatgctgtggactggagagattttttttaaagatgccagttttgtttgtttttgtcagggactgtcacaatt

SEQ ID NO: 36272 - DNA, 1053 bp, Mus musculus
taggcaatattagatttggtcaagttgatgatcacaacataaccatcacaagacagtaaccattacaagagcctttttttttttagataactgagaccactagcatgtttgtgtaactggtacctgcaggaaacattagagtaacaaaatccctacttcagatatctagggacattgtagacgtgtgtagaacaaacgtgtggtacatagaaaagtcttaaggaacttaagggcagttgagatggaagagtgggcaatagataatcaagtggtagatgagtctgtattaactgttgcaaaaggaaacaaccctaccaaagactttgcctgtcataaccttgattcaaagtagccatctaatttctcactcttaacttccttctagcctctctttccccagagagagctgaagattcagacgcgttaacagctgtcagcagtcagctggaaggttctcccatggacaccagcagcctggcttcctgtacgttagaagaggctgtgggtgacactccagcagctggcagttctgagcagcccacagcaggtagttccactcctggggatgcgccatcagttgtggcagaagtgcaaggcagacctgatgtatcaagagaatccaaccagccacctgaggacaggtaagtactatatagccaagaggagattaggaatgcattagaagttatttcaagctaaacactatcaggcatgcttgttgcactgtgattgatgtgttctatctgagatgggtattaggaatgtttttgttgtttggtttgtgtttgctttttatggggaaactgtataaagaaggatgatttctttccctagctccccccctgcatcctcggagagttcttccactagagattctgccgtggccatctctggagcagattctcgtggaattctagaagagccactaccttcaacaagcagtgaagaagaagatccccttgctggtaagtttctgtttccaaaaaaatcattgcttggacagacataaccctccaaacactttcctccaggtcggtgtgtgagtcgggggtg

SEQ ID NO: 36273 - DNA, 1159 bp, Mus musculus
tcttctctatatctttgcaagcagtggaaacacaaatggctgattttcctcaacccatgatttgtgtttcttttctctgagtatacctttgaacatccatgaagatgtaagttcctttacatcttacaatctctttaggtatcagtctccctgaaggtgtggatccctcctttctggctgctctccctgatgatatccgtcgggaagtcctacagaaccagctgggcatacgtccaccaacccgaagtgctccctcctcaaatagctcagctcctgcagtagtggggaaccctggtgtaactgaagtgagccctgagttcctggctgccctacctccagctattcaagaggaagtatgtaagcgggaacatggtgagaacagttttagcttgaaaagagctatactcttactgatttcttttcttctataggtgctagcacagcagagagctgaacagcagcgacgggaactggctcagaatgcgagctcagacacccccatggaccctgtgactttcattcagactttgccctcagatctgcgccgtagtgtcctagaggatatggaagacagtgtgttagctgtgatgccacctgacattgcagctgaggctcaagctctaagacgagaacaagaagcccgacagcggcagctcatgcatgagcgtctttttggacacagtagtacttctgcactctctgccattctccgaagcccgggtacacagggaggcaagtgggagggctctggaatatcttgcttggccttgttttttaattagcctcctttactacctgttagttgtttgaacccagtttctcctcagttcaccaaattcagtttcctttttcttttcttgtagcttttaccagtcgcctgagtggcaaccgtggggtccagtatactcgccttgctgtacagaggggtggcaccttccagatggggggtagcagcagccataataggtacccttgtctttttttttttaaacctcactatactaccttctgagtcccttaattttgtaagtagagaagctaaaagattttgtggcggccaggatgaccattctgggctattttccttgaaatgagtagacaagcaaaatctgtttaaattccaagtgccacagctcaaaaaggcaggctagcagcagat

SEQ ID NO: 36274 - DNA, 2374 bp, Mus musculus
acttacgactaactaggatgaagcacagtagatttaacattctaaaacaattatagaaaagatcagtccttataaaagaatggcagctccttaatctagaaaaggcaaaaagcaagctgtggctcatagaccttagattttcatcacttagtaaatgataaaaatatgaatctctgctctcttcatagtcatgtaataaagagcaaattatctgatttgtttgagcttttttcactcacagtctcaataatgctgtacaacatccttcagggaaagaagttgtaaagtacctggtatatgatagatacacaatagacttgttgctgtggattgttttgtcttcttttacagtcttcctgggattatcccactcgttcttctctcatgtacctcatatactgatcctagtgctttagctagtgttacccagaaaccatgctctgtttccaggccttctggcagtaatgtggacacactactccgcctccgaggacgactccttctagaccatgaagccctgtcttgcctcttggtcctactttttgtggatgagccaaagctcaatactagccgtctacaccgagtactgagaaatctctgctatcatgcccagacccgccactgggtcatccgcagcctcctgtccattttgcagcgcagcagtgaaagtgagttatgcattgagacacctaagctctccacaagtgaagaaaggggcaagaaatcaagcaagagctgtgcatcaagcagtcatgagaaccgtcccctggatctgctccacaagatggagtccaaaagttccaatcagctctcctggctctcagtatcaatggatgctgctttaggctgtaggactaacatattccagattcaacgttctggagggcgtaaacatacagagaagcatgcaagcagtggttccactgtccacatccacccccaggctgctcctgttgtttgcagacatgttttggatacactcattcagttggccaaggtgaggagcttgaaggaatccttgaccccagggttttttgggcatcaacaccttgggtgagatctggacagtaaagggctaacagatctctttgttgatttattttatattgtgccatttgctgtttctgagaaattgtccaataaataacttcatggagttttatctctgttctttacaatttttaatgtactatctcagtcatcgaaacaactgtttacactctatatgattcttgttttacagataaagaagctgagattcagagcactttagtggctttgtcgtttgactagaaagtgacaagctcagtattttttgaataataaacagtgctactatgtattgggggcccacctgtactaggcaccaggcaaaatgcatcacctcatttaatactttgtgtcgttctccttgtttcattaagtgcagagagacaaaagatttagaaagatttttaattttgtcttgcttcaaagtccttatttttttaggctgcttcaccatctactggatagaagtcatataatccatctgtcttgtattagcagagctggaaaaggaatagtctgagaagcaattgtcttttcctgtcaggcttatcctttacagagactccttagatcgaacctattcttttccctgcaggtgtttcccagccactttacacagcagcggaccaaagaaacaaactgtgagagtgatcgggaacggggcagtaagcaggcctgcagcccatgctcctcacagtcctccagcagtggcatctgtacagacttctgggacttattggtaaaactggacaacatgaatgttagccgaaaaggcaagaactccgtgaagtcagtaccagtgagctctggtggtgaaggggaaacttccccacacagccttgaagcctctccactggggcagctcatgaacatgttgtcacatccagtcatccgccggagttctctcttaactgagaaactcctgagactcctctctctcatctcaattgctctcccagaaaacaaagtatcagaagtgcaaactaactccagcaacagtggttcctccactgctgccacctcaaacacatctactactaccaccaccaccactactgccactgcccccacgcccacacccccagctgcaactacccctgtcacttctgctccagctctggttgctgccacagctatttccaccattactgtagctgcttctaccacagtgactacccccacaactgctaccactactgtttcaagtaagtgtttaaagtcagagctatggggtatgggctcccatcttactctcacttcccaatccagataatattctctaaatcataattattgtgagaacaggatgtgttcattcttagcc

SEQ ID NO: 36275 - DNA, 3037 bp, Mus musculus
aaaagaactggaggaatctcatgaccagcatgcagtattaggtgagttgctctctgaggttacagattcccagccccttggtctgctcttggacactctctgtctggtaatggtgctggcgattatcttgctttttcagtctaagtttgttgaactccctctgtgtgtctgtaacaagaattcaaaagaactgccctctcttagttaactctggtacttgtgatttgtctttataattgattgcctgttttgcttttctaacttcctctttttatttgtattaccctgcaagtttaaattattctatgttttatatttgtgatgtgtttatgggaaggttaaactttataaagtttatgttaaactttgtaaagtgtcactttgctgtcattgctatcctccagtgctacagcctgctgtcgaggccttctttttggtccatgccacagagcgggagagcaagcctcctgtccgagatacccgtgagagccagctggcacacatcaaggatgaacctcctccactctcccccgcccccttaaccccagccactccatcctcccttgacccattcttctccagggagccctcatctatgcacatttcctcgagcctgccccctgacacacagaagttccttcgctttgcaggtacatggaactcttagacccatagattttatccctatctaattaagcaaaatgagagagttggcaaacatgcttgcatactaacatccaacacacactttggaaaaaaaatagacctagttaattacaggagagttctgctatagaacttcttagattccttgcgttccaaaggatttgggttttattgtaaagctaggtgttataaatgcccattcatcccttaggagtgtagcccttgcctttagctatttcctgatttaggcccctaaaacaaataaaaccaagttggttgctagtagactgttttgtagtttcttaggacctataatatgctgattcctgctgttatcttttctctcagagactcaccgcactgtgttaaaccagatactacggcagtctaccacccatcttgctgatgggccttttgctgtcttggtagattatatccgtgtcctcgactttgatgtcaagcgcaagtatgtaccctgggatatattggggtgaaggactatataaacgatacctgtgtcaccttccaggggaaaaaagctatagttgttcctagggttataagggtttcttggtggtactacatttctaaagtcccctctcagcctttagagtcatagcagcagtaatatagtcaaaatgaggttcaagactccttccttgtcatctctactccttcttatacagataaatgtgctttcttgattgttgcagaaatcaaattggctctgtgatctctcattcactagaaataggaaaattttgaattcgtaataaatgatctagcccagctgctatagactttccgggtgtgggggggttaaaagatcaaagggaacatgtcactgtgagttttccttctgaacagacagatataagtttgctttaatcacccccaatcctacttcctttccttttctacatcctaagatatttccgccaagagctggagcgtttggacgaagggctccggaaagaagatatggcagtgcatgtccgccgtgaccatgtatttgaagactcctatcgtgagctgcatcgcaaatctcctgaagaaatgaagaatcgattgtaagaactcaggagagaaaacagctaagatgattcagggcctatatgctatatcgtagcagtgacctaatgtggcctcaagtttaggggaagtggtcacaaaactcccagtagcattctggcttagataatgttaattgagcttcctgcatttggacttggactgctgacttagtcaccaagttttaggcagacaaggatgtctttaatgcctttgcagtgcaagcttaatatattattaggctaggaatagaaatttgcctgcaaagcagattggtaaccctgggtttgggaggcaccatgtgcttgagtgccaccccccactccacccccagtcagtaattgttcactggtgaagccacctggaagaaattgatagcttgtagccataagtatcacagtagctaatgagacagattaaaatcatggtctctcctggtactctgtttacttcttcatctaacagtggactctccaaagtcagattcacagaatctttctcccttacatgatgctacatgaatggtcagatctgtcctggctttctgcacagctctcttatttctgctcttatgcaggtatatagtgtttgaaggagaagaagggcaggatgctggggggctcctgcgagagtggtacatgatcatctctcgagagatgttcaaccctatgtatgccttgttccgtacctcacctggtgaccgggtcacctacaccatcaatccatcttcccactgtaaccccaaccacctcagctacttcaagtttgttggacgaattgtagccaaagctgtatatgacaaccgcctcctggagtgctactttactaggtctttctacaaacacatcttgggcaaatctgtcaggtgagattatggtagcctttagactgcctttttagccctatgactctcttatctttatcccccttttatttctgttcctcaagccatgaccctatctaattgcatttttctaggtatacagatatggagagtgaagattaccacttctaccagggcctagtttatctgcttgaaaatgatgtctctacattaggctatgacctcaccttcagcactgaggtaagttgggggattactttggaactgactctctgtatcaacagttctgagaaagcactttgacttcatcaaacaggaaatagaattggtaaaatagtccaagctgtctcctagtttctcctcagtgggtaagagcacatgttttgcaagccttatggcctgagttcagatctgacacccaggtatggtcatgattgagtgcttggaacttttgaa

SEQ ID NO: 36276 - DNA, 1149 bp, Mus musculus
cctgcacaaacatgaccaagaagcaagttggcgaacaaagggtttattcggcttacacttccatactgctgttcatcaccaaggaagtcaggactggaactcaagcagatcaggaagcaggagctgatgcagaggccatagagggatgttccttattggcttccttgctctggcttgctcagcttgctctcttatagaacccaagactaccagcccagagatggttgcacccacaaggggcctttcccccttgatcactaattgagaaaatgccttacagctggatctcatggaggcatttcctcaactgaagctcctttctctgtgataactccagcctgtgtcaagttgacacaaaactagccagtacaggtgtcaaactgaggctgtattaactctgttcagttgtatgagttctgattccatgtcacttttttttttttttaaaccaggagccatccgcaaacagctggcagccttcttggagggcttctatgaaatcattccaaagcgcctcatatccatctttactgagcaggaattagagctgctcatatcagggctgcctaccatcgacattgatgatctaaaatctaacactgagtaccacaagtaccaatccaactctattcaggtgagcggaggtatccccatactcttgagaagtatgaaacacttatcagtgctggtttatggataacagtatacctatgcctctttttgttcttctggagctgatgttctcacctatcctgtgaaggaacaaaatatttcaagtccattgccatttccttaaatttctttacaagctctctttggctttttgtgtgtctcttcttacagatccagtggttttggagagcattgcgttcctttgaccaagcagaccgtgccaagttcctccagtttgtcacaggtacttccaaggtacccctacaaggatttgctgcccttgaaggtatgaatggcattcagaagtttcagattcatcgagatgacagatccacagatcgcctgccttcagctcacacatggtaagaaaacaacttaaaagtttctccttttcagtgattttattgaggttgtagacttgatgacttctagacacctacccaagattgggagcacaagtatggcctagtctacaac

SEQ ID NO: 36277 - DNA, 1600 bp, Mus musculus
gcttttgcagaagattcagattcagttcccagcacccacatgatggctcacaaccatctataactgcagttctcagttctctgatgccttctggcatcaacaaacacacagtaaggtgcacatacagacagacaggcaaaacacttaatatacatgaaataatcttgttttaaagtgaagccttaagggatagattaaaatttaccaactcactatatatgtgactgccagctatctcttctccagtgcattaaactttaacctataggttaaggccatggtgtataagttatagtaagagccaatttatgttgctagtattgaggccagattagcaagttggagaaaaaaatgggagagtcagcaagaagcagtgagtacatgagctctggctcagaaaggagcagaaggtttcattgttcttttctcatgaatttaatctttattcattctagttttaatcaactggacctgcctgcctatgagagctttgagaagctccgccacatgctactattggccatccaggaatgctctgaaggctttgggctggcctaataaataaggccctgcctacttctgtggggtttttctaccattgttggacctggggaggggggtggatttaaaagatccagaaagaaaatgtcaaaatccaataaatgaaattcaccaactcaccatgtgtgtcccagctgcccatcttccctagtgcatacctgttcgcttctcattctcttttgtctcccctttcctcgcctctcccttttccatgccgtccatgatccccaccccatgtgttaagaaggcagtagcctttacagggacctgtttgtcccaaatgaacagtgtgctcctcagattctgtgttcagaaggatttgctgcattgagacttgaaacctttggataggggaaaaattatatatatatatatttttttgttctgtttgcatttcttaatttgtgcttggaatgtgttgatgtgcacagctaatgattcaatgcgagacaagattggcatctgtgttgtggaggtttcaaataaagagcactcttcataactcacttttcacaacggagtttttttcaaactgaaaaagaaaaccccatcttatacacatactagacaaatgaactttccagaaaaccatttctgcccttcctgatcacccacccacctccacttctggtatagaacttcttccttcagtcagtttccccagagaaaagactgacagacaccgggaattggggggatttttgttatttaaaatgggtatttggaacacactgcagcaggtactatcaaaacagttaacccatgcaatgtttcgtttggtaagcatttatgataatctcaagtttaattttcttaaaagttttggtccctttctagtaaattttaataagcaaaatatttgactagctcgccacaagaccaccttttttgtctgtcttgtcatttgtttgcaagtattcacagattatctagtagtctcttgtggtttttactctatccagcactttatcagactttgatggttccagccttgaacaaaaatttaataaaaaatttagttagaaaaacaatcccaagt

SEQ ID NO: 36278 - DNA, 1169 bp, Mus musculus
tgttttctgggggaggctgttaagtcttgtggctttttagttaatcttgtctgattccaaaagcaatagtctgtcttaggaaacatatagcttcactttttaagcttctgatataagtgaacatagaggcaatgtgatttcttactcggttctgaggtgctaattgggtcttccatcttttaacatgtttattcagtccttaatcttcctcttagccaaacttctatctttggaaggagcattagaattgactgctgtactagtctaaattgcttgtagccatacaagtctaacaagtccctcccctcgggctgttccccttcctatcttagtggtatcatatagtacaaaagtagaggactgactgcaccaacaagcagcaatgagtgtattcatggtagcttatacagatttttatcttgcccttctttgtaagctagtaattgggattcctaagccttgtgcttcagtttcccttcttcctttatattcagtatggccgcctcattgacctctgccagcctacacaaaagaagtatcagattgctgtgaccaaggttttagggaagaacatggatgctattattgtagactcagagaagacaggtcgggactgtattcagtatatcaaggagcaacgtggagagcctgagaccttcttgcctcttgactacctggaggtaaggcttgtgaaggggtttggggtcaaggcagtgttatgggcccctcaccttggctttatgtattctgttgcttcataagattcttcacacaggtgaaacctactgatgagaaactccgggagctgaagggggccaagctagtgattgatgtaattcgttatgaaccacctcacattaaaaaagctctgcagtatgcttgtggcaatgcccttgtttgtgataatgtggaggatgctcgacgcattgcctttggaggtcaccaacgccacaaggtatgcaccctccccccctttctcaggttggagttggacaggctcagtgtcttagtcagggtttctattcctgcacaaacatcatgaccaagaagcaagttggggaggaaagggtttattcggcttacacttccatactgctgttcatcaccaaggaagtcaggactggaactcaagcaggtcaggaagcaggagctgatgcagagccatggag

SEQ ID NO: 36279 - DNA, 1153 bp, Mus musculus
caattgccaaataccagcatgctttcaagtttctgttattccaagtgtccccttcagaatggagtacttccttgcagtcctccctcatctccaagtaacacgagtgctgcttcctttgctggatacccaaagtatttcttatgggctgctatggctgttttcagttgttatgaatagagtactgtgtgcctcttgaaggcagatactagattttcctcatctctgccatagaacactatttattgaatgaataaaactgagaagactgaagactaataaagacttctcatatctgtatttatctggggaagtggtacatgcattcaactgaactccaggccttgaaagactagcctatttagggccatgaacaacccagcaaacacctctggcttctaacagagctctctggaacgggatattgtctggaggggcctggtgtttgaagactgggaagggtctatattcataaccctttgcttttctctggcagattgagtcatacgtatgccgaatgtgttcccgaggagatgaagatgacaaactcttactgtgtgatggctgtgatgacaattaccacatcttttgcctgctgcctcctttgcctgaaatcccgaaaggtgtctggaggtgtccaaagtgtgtcatggcggtaaggccttcccagtcccagttcacatgggatatctttgcctgcctttgtatagtcttaaggggagccttctgcctcagctatagtattactgtgttttgggacctcaagttctgcagagctttgtgagaaaaagaggatgtaatttatgctcctatcctctgggagctcccagactatctatggggtattacatttagatggactgtgtgtgatggtgaactatgtgtgctgacatgtaagcagatattaaaattgatgttagaaaccctgagttgagcctggtctacaaagtgagttctaggacagccagggctatacagagaaaccctgtctcgaaaaaacaaaacaaaaaacaaaaaacaaaaaaaaaaaacaaaaaaaaaaagaaaagaaaagaaaccctgagttgtagttgaacagatagaaaaggtgggtttgttggttggttagttggtttggtttgtttagttgtgatagggtcttattctgtagcaccgg

SEQ ID NO: 36280 - DNA, 1482 bp, Mus musculus
gaactgaacctggctcttctgcaagagcaacaagtgctctgaactgagctatctctgcagcccctgagagaaacaatttaaaggaaaaaagatcttggctcacagttgtagaggtttcagcccattatgatggggaggtgcttatggctccactcacattattataggtagaaatcagaaagacaaagacagtgtacggctgggcaaagatactgcctccaaggaactcaacgtacaacctactttctacaactaggccccacctccagaacactatagaacattccaaaatagcactaccatcttgggacaaagtctttaataggtgaactttttgggaaggacacttcaaaccctaacagtgagcagaagtatgagagaaatgcctgtggcatgaatacatgtgatgagctagctcatgtgggaggaaggaaaagatagagctgcaaagcaaggctttccctaggatcctggaaggctgagtgagagcaattctccctccctccctccctccctccttctgtctcatgtttcagttccacttgagatgatttgctctttgcctctatttttatgatttgttctcgtttgggttacaggagtgtaagcggccccctgaagcctttggctttgagcaagctacccgggaatatactctgcagagctttggagagatggctgactcctttaaagctgactacttcaacatgcctgtgcatgtaggtgatgcagggctggggtagtgctgagactaggttcataggcactggtactgtacctccctaaattaatgttgacaggataagatgtcatttactatcctgttcccccagatggtacccacagaacttgtagagaaggagttttggcggctggtgaatagcatcgaggaagacgtaactgtggagtatggggctgacatccattccaaagaatttggcagcggtttccctgtcagtgacagtaagcggcacctaaccccagaggaggaggtgagtgggtgattctcatggttatatgtcatgttacatgagcttgggcaagttatttagtatctgaaagacatcaaaatcccttttgatgcctgcctcaggtagttactttgaagtgtagatgaactgctatagagtaaagaacacagcctaggtagtatctggaatgtgcatggatgagatgctgttttaaaaattcttcttgccaggtgtggtggcacacgccattaatcccagcactcgggaggcagaggcaggcggatttctgagttcgaggccagcctggtctacaaagtgagttccaggacagccagggctatacagagaaaccctgtcttgaaaaaaaaaaattcttctctcatacattacatcccaaccactgtttcacctccttccagcctcctcacctcgtgttttctctcccccatatccactcctcttcagaaaaagaacaggcctcccaaggatattaactgaccctctgaacctg

SEQ ID NO: 36281 - DNA, 1144 bp, Mus musculus
gaaggcaggcagagccagttttggcaactgctgaactttgggggtcagtgataggccctctctcaataacattctcaataacatagagaatgatagaggaagatacctgatgttgacctctggcctccacatgtatattcacacttgtgtacccacacaaacatacactgaaaatatactacacacacatacacacacacacacacaagaaaatgtaaaaaaaaaaatgctgggcttggtagttttcacctatgattccccagctactcaggaggttgaggcaagaggatcataagctcaaggcctgctagggtaacttagtgagactgtgtctcaaagtagaaggaactcaggttacagtgatagaacgaacatttgcctagcatttgtgagcccagagttcaatcctcagtcctggggcagaaactcagttccttagcataatcctcatccttctgtacaaacacttgacctgacaggagtatgctacaagtggttggaacctgaatgtgatgcctgtattggagcagtctgtactgtgccacatcaatgcagatatatctggcatgaaggtaccgtggctgtatgtgggaatggtcttctcagccttttgctggcatattgaagatcactggagttactctattaactacctccactggtgagtggggctatggcaagctggggaggtagtcagggtgatctccctacataactatgcacatgaccattctgtgtcctctaacgtgaacaggggtgagccaaaaacctggtatggagtcccatcgcttgcagcggaacacttggaagaagtgatgaagaagctgacacctgagctttttgatagccagcctgatctccttcaccaactcgtcaccctcatgaatcctaacacgctcatgtcccatggtgtgccggtgagtgcccagaaaccataggaaggtataggaatgatgtactgatgacttttatgctagcaattgtagtcttcacttgtggtttatccctgctttctcttattcctcttctgccttgatgggactgttttgaggtctgtgatcatcgtggttggttagatatgcaatgtgatagtgagttctttccatgggtttgagggatactttaggctaccttagggatagct

SEQ ID NO: 36282 - DNA, 1194 bp, Mus musculus
tgctacaatgcccagctcctaatctgaatcttacccaactttttctatcttcttctcttttttttgtcctgaagtccatactgatcttgtcaattatgatccatcagaacccctgctttgagattgtagagttgacagaaggcagatgtgatgtgaagcttggctttccagtcttcacaaccatcatgaaaggtttgagttactctgatagtgagatgggatttctgccaccctgactggttctgaacaatgtgtgggttgtatgccccagggtatcaccgaggctgagcgagaggcttttgagctgcttccagatgatgaacgtcagtgcataaagtgcaagaccacatgtttcctatctgccctggcttgctatgactgcccagatggccttgtctgcctttctcacatcaatgacctctgcaagtgctccagtagccgccagtaccttcggtaagtctagggcctatatgaaggaaggaggagagtgccaagttgggctaaagtgtactctgcgctgtgcttttccaggtatcggtacaccttggatgagctccctgccatgctgcataaactgaaagttagagctgagtcctttgacacctgggctaacaaagtacgagtggccctggaggtggaagatgggcggaagcgcagtgagtgactggggctgggggttgggatggggaggttagagggactcttcagacaagttctattcttgtttcttctgtatctctggcccttctcctctgccttgaattaatattgcctaatccttcctgctctttctccaggcctggaagaactgagagcactagaatctgaggctcgtgagcgaaggtttcctaacagtgagcttctacagcgactgaaaaactgcctgagtgaagcagaggcttgtgtgtcccgggctctgggattggtcagtggccaggaagctgggtatgttgatgtgaggtgaaaagtgtgttacaaggggtggattctgaatacagtggggtccttggaacattagcaggaagttgccaagtatgaggtgatagcctgggaagtactgcagagtgcaaggataggcaacttttcatggagaatgagagccttgacaataagaaaaattagaagtgtttataatcaacatctgtagaagatttgagaggtaggttgagggagtttgtgagcagggaggagtgt

SEQ ID NO: 36283 - DNA, 1256 bp, Mus musculus
gtctgagccctgtgaccatgggcagaccacttgcttcctgagctcagttttcctggtttgggagtggggtattgcgttcagagaacgaaagaatcagcttgtttacctattcttccccctttcctgggcacggcagatcgtggccttcaaagagggggagcagaaggagaaggaagggatactgcagcttcgtcgtaccaactcagccaagccaagtccactggcactgttgacaacagcctcctctacagcttctatctgcgtgtgtgggcaagtgccagctggggtgggagctctgcagtgtgacctgtgtcaggactggttccatgggcgctgtgtgacagtaccccgcctcctcagctcccagaggtccagtcttccctcatccccactgctggcctggtgggaatgggacaccaaattcttgtgccctctgtgtatgcgctcacggcgcccacgcttggaaaccatcctggcactgctggtagccctacagagactgcctgtgcggctgcctgagggtgaggctctacagtgcctcacagagagagccatcagctggcaaggccgtgccagacaggttttggcctctgaggaagtgactgctctgttgggacggctggctgaactgcgccaacggctacaggctgaatccaagcctgaggagtccctggcttacccttcagatggtggagagggcactggcaatatgccgaaggtgagctgcttagcctagctcttaacttcaaattcctgtccccctagctctgcccctgtttctcctgttttaaatctcctttggcccagcctttttgttccatcctattatctgtccaaattcctaaaccctgctctcagctgacaccccatgtttgccttcctccaagagatagtcttccaggtttggcatgggtgaaggaagagtagggcctggctcttcagttcagttaccccttgccttttcctgatcttgatatttgataggtccaggggctgttggagaatggggacagtgtgaccagtcctgaaaaggtagccacagaggagggctcaggtaagagaggtaggtctagctgtagtgtgagtgggatgttgaatggatattatcagtgtggcccctgatgtcctcagctttgttatagcggtgtaggataagaccaagggaagcctctaatccatcctgtccctgcatcttccagatctggagctgctatcctcaatattaccacagttgtctggccctgtgttggaactgc

SEQ ID NO: 36284 - DNA, 1973 bp, Mus musculus
acaatttagtctttttgccttctgtgttcacagctggagaaggcagagcgccatgggagtcggacacgaggccgagccctagagaggagacgacggaggaaggtggatcggggtggggagccggatgacccggcacgagaggagctagagccaaagagggtacgaagctcaggaccagaagccgaggaagtccaggaggaagaggagctggaggaggagactgggggtgaggtccctcctgtacccttccccaacagtggcagccccagcatccaggaggaccaggatggcttagaaccagtgttagaggctggttctgacacctcagcccctttctctactctgacttcccggctgttgatgtcctgcccacagcagccatctctgcaacaattgtgacagtggctgagcctagcacagaccccaacaaagatccttccttggcctcaaggatcctttctgaccatcaagcctgcttcttggaggtgggcgggtaggtggagagacttccccctcaccaccatccccaagatcgtgacttttatattctgactccaaggtattgttcagacctcagctcctgggggccggcccctggagtcctgcgtccctggtaacctctaaccagcattcccagacaccagaggcagatagacaggtgggcaggggatctactggggctgggccagcaccattccagagacaaatccagggcacatgcaaactgggggacctctcccttatccccagttctgaccctgggtcaggccatgctacactaaccttccctccccacttcacacttttgctcccccccccctcccagtccattttacttctttcctctccccttcatcttttcccttccccttactgttccacccaggaggaggaaacttcacatagctgtcctcacccttttattttaaatgaattttgttggggttgagcagggctgcctatggtctgaaggcttttggtgcttgtccacacacccacctcaacccttcctgcccatcctcccctatctcctttcctcctcctgggttcatgctgtaataaagaagattgttggtgtgtaattaatttgttcaaaaggagaaaaaaaaaagcaaaacaaactttgtttcaactaaagcctattttaattttattttattattttcctcattagaaataaaacccttaggaatgttttttttttttttttttttggaaacatgtttctgaagtgcatttctcttcaaaaagagagcagaaccttcctcgcctgttagtggagcagctgcagtgccagttagtagtagtgccagggccagggaagcagggctctgaattcaaatctcaccaacttctctctaaccttggaaaagatatccttcctggtcttcccccaagccattgcagactggtgggcactggccccctttgataatttgcacgacagcttcccctagctttgtgctcttgattttctattctctgggggactttttcttcatggctttattgaggtagagtttccatgctataaagttgagctgttttaaatatgtaatttggtgagtcagaccatccttggtgtttctccattagttcttcctgcccctaatgaatgtgtggttaatttgtaacgtctgtgtcactgttaaactgctctgttgagatgaaatgtgcatagatacagttcatccacttcaagtatacaattcagtgacttttagtatatttcagtcattgaatcactgcaaaaagtttagactgtttttacaaccccagaagacattgcctaggtagtccctccttcctcccatttgtctcttctggacattttatataaatgaaatgatacaatatgcgctccttttgtgtctgccttctttgacttagcctattaacagtcctacagtagttgtattttcgcccttctgagcctgaaagaagggactacgcttgatcagggactgacctct

SEQ ID NO: 36285 - DNA, 1337 bp, Mus musculus
taatatacaatggtgggaaggcatatacagacattccagttcaaaaagggcaaaggatatgtgtgtgcctgtagcagttggaaacaggagctgtttccaaactggtccgttacaagttaaatccatctgggcatatgaagttccttgaattgattccaaaactgaggatggtttttcatacccctgtctctgctttctgggctcttgctgtcacctgtgatttttttcatgagaggtagcacatgcttgcaaccaagatttttttttctgtttcctgccagaattttggagggccaggactgacttcttgcagtgcatgtgtaatcaattatcatcaaggcaaaggacttctttttggcatgttgagcattcaacagtaaactacaatgagattggccttcagggcaaccctgacttagagcccatgcctgctatcatggccactttgttcagaagcctattggcaaagataacggtgacaggatagagattggccacacccatagaatggaatatctcttttgagattttctatactggtgcttgtttacgtgggtcatgaaaattctcactgtgctcattccaaaatggacagctatttgcataggcctttttcctcagatgtctcttcaacatttcagtcttgttatttccaaatccttgactgtatgcagacatgaaccagcaagctgtctatgcttttgactgtttctgtaatagtaacccaaagtggagctgtaactctgaaactagccacttgtagcagaggctagcatgtcctgcagaacatctgtaagccaagcgtgaatattgtatccctcagttgtctggtctcaaggaaactccccatggggtctcaaaggaggaaaaaaggatgacaatgtagcaagtgtgagtttccagacctgcacataattttagcggacatgatggaacagttgcaaattattgtttgatgtcatggactcagatgttcatttgagaaaatgaaaaagtccacttttctatttttatttttctttgcttctgagatcttgctacttgcagttttgccctccatttttgtttgttttgtcttataaatatgttgtatcttgggccagtgagatggcccagtgggtaaaagtacttgctacacgagcctggtggcctgaattcaatcccagggatccacgcggtaagagagaatcaactcatgcaagttgtcctggtcaccatttgtgtgcgtgcacacataaaatagatgtaataaaaataatttttaaaatgttgtatctctttattatttcctgttgaatcccagaggagaaatgagtcttcctcccctaccagggccc

SEQ ID NO: 36286 - DNA, 1796 bp, Mus musculus
acatgaacttccggaggacacattcaaacaatagtgggtacatattctttcctataatagagatatctaattgtcttggcaccttttgttgaaaaggaaattattttccccactacattgtcttgacaactatgtctaagtcaatggactatattttataaatataaaggttaatgtctggactctaaatttcatttatctatatgctttatcactcactacacaaggtattgtctttattacttgctatatttgagtagcatgtttaaaattaaaaaaaaatatgagtactccaattttgtacttttaaaagcttattttggctattgaaggcccttactttaccatatgactttctctatcagcttatcagtttctttttaattttgattattttagcacattatatgtctagctagcagtttatctagtgttctagattttccaggagtggttgaagtttaattgtgggttgagagtatttaatctcgtatttgtttttaagacaaggtctgtctgtgtatcccttactaagctagaacttgctatatagatgaggatgctctttaacttacacagatccttctattgctgcccccaaacgctgtgattagaagcatgtagcactatgcctggctggaatatattttcaaaatattccctaataagagacaggaggatttctgtgactttgaggtcagcttggtctacatagtgagttctaggacaaccagagatacatgatgaatccctgtctcaaaaacagaaagtattctctaatgatcctctagattgtattaaaattaattgtaatattcctttttccatctctgatcttaattaattctcacatttcttgtctttagtttggctaggggttcactgctcttgtttttttcttttccttatgttttttttaaagatttatttattttatgtatatgactacactgtagctgtcttcagacacacactagaagagggcatcagattccattgcagatggtgtgagccaccatgtagttactaggaactgaactcaggacctctggaagagcagtcagtgctcttaaccactgagccatcttctctagcctccttctattgttcttttagtctccatttcactaatttctgccataaccttttataaaatctgtctctgtatgcatgtttgtgtatgcatgcgcaagtgcgtgcatacacacacacacacacacacacacacacacatgcctgcactctcaagctaactactgttatctgtggaacccacaggtgtcaggtctccctggagttgcagatggttgtgagccatcctgtatttctctgtgcagtcgtactgtctgggactctctttgtagaccaggctgacctggaacttatagaaatccacttgcctctgcctcacgagtgctggaattaaagacatgcaccaccactgcccagccaatttctcttttgtgttaaatatatcctacctacttttattcctttgtaactatgttttaagttaaattttcagagattactctaggtgttaacaattgaaattacaacttgaaatgatatactttgggtgtgtatcaaaagcttgctgtgctgctgaggcaggaagtgagcaagagcctgtagtacacagcaaaatgctgtcaaagaagggagtgaggggaaagggggactttctccagaataagaaaaatcattaagagctgggtgtggtggtgcactcctttaatcccagcactcaggaggcagaggcaggcagatttctgagttcaaggtcagcctggtct

SEQ ID NO: 36287 - DNA, 1215 bp, Mus musculus
ctatccctaatgtggttggaggtacaatatatataacaatgagagtggcccaaaggtagggcacaaaactggagcctggtcttgagctacttgtaagtctcattgaggagtctctgtttcttggccttctctgttaaacaggtagaaacaccaaggatggggagaaatttatattaagctacttttcagccagctttgatggtggtgcatgactacattcacagcattcaggaggattgccacaagttcaagatcagcctcagctacataatgagtccaaagtaaacctgggttacaatgtaaaacactgtcttgcccccccccaaccccaccaaaacatttttattttgttggtttttttttcaagaaagggttttgctgtgtaacagccctagctgtcttagaaatcactctgtagcccaggatagccttgaactcacagagaacagcttgcctttgccttctgagtgctgggattaaagacatgcaccaccaccagggctacaaaacagtttaatagccattatgtaatgttggtcaccacagatagtccaaggatcttctaattatatccccttgtaggcctgagcatcttttctgtccttatctaggagttcttctagatcagacattttgaaactccctgtcaagtatcacaactctcttcccattcctatgctaatttttccatattcttgctatacctttgtcattctgacaactatagacccaatagtctattttaataatgtgtagtttgcctccttcactattttttaatgaagagcataaaaagtagactctgcatacacaatcctcccacagcttataatgacattttaattgtaatataatagagaaatttttttgtttgtttttcaaggcagggtttctctacgtacagcactggttgttctggaactcactttgtaaaccaggctggcctcaaactctgcctcctgagtgttggggctgaagaacaatgtataataaaacagtatgcacttcaatacgtaaatgctttgatataacttcactaaaagaaataattttacacattatttcatgtatctgacttgtacatgtgacagctacatgtgtattgattgagtggtgactcagaaaccatatataggatatagttccttttccataaatgatgagtaattcttcataaagttctaaacaaaagaacgtgtatgtatatgtctcttt

SEQ ID NO: 36288 - DNA, 3246 bp, Mus musculus
atgccaaggagcttaaagagaacctggaccgccgtgagcgcattgtgttcgacatcctggctacctacctcagcgaggagaacctggctgactatgagcacttcgtgaagatgaagtcagctctcatcattgagcagcgagagctggaagataaaatccacctgggtgaagagcagctcaagtgtttgtttgacagcctacagcctgagagaagcaaatgagaggcacattcctacagaaggtggacaccaagccctggagattaatgcctgagactataagagtgaacccaagcctatttgcccatctctggagagacatactctggagccacgaggctagtaaaaaagcaataatgtcctgctagtatgtgatgatttatttatgattttcatttctgttggtttgctgaacatagtttcatatcacatgtgatttcacagaatgccaggctttgctaaacaacaagggttctctagccctcctttgcagcagtggcaccaatgttcctccctcgtgtagatgccaaatacagtcctacagtgcatgagaggaaagacccttgtgatttagccagacacgggctgctgtgtgttctgtccttgttcatttaacaatgtgagcattcctcattctgtcatggtgacattctctgactcagtaaaaatcagtgatgatatttattcatgtgtggaaaacatgaacagtttcctagtagttaaagactaactataaaatgaacaatctacatattggatccattcattccaagattaaaattatcacataacttgtgtgcatgttttgaaataccctaaacagatatctagtatccttcttgtcacatcttaaatactttctagccaagtgattttaattggataaaagtgtgtctactaataatgttattgcttgctttttatttcctgagaccaatggaatattttgaagtttccttccctggaacactaatttgtgtatatgatctttaatgataatcagtggtttatctctttttatgtctgttaccatgggccacatgccacatgccacataccttaagacttaagactccatctagtggtcagaggtcctgtggagtgactagtgcttacatttgaaacagagttttgtccttaacagttcaaatggcaagatgacaaatagagtgttattcatgaaagctacactgtcattctgttggtttccagttgacaggacagattgggaaaagacatttttaaatcatgtgtctgacttgttgctcattttgtttttgttattatttgtttgttttagaagagtctaacccagattggcttcaaactccctatgtagtccaatgaccttgaactcctgatcctcctgcctccacatcctgagttctgggtttagcagcatatcccacttcatgacttcatacatctatctgataaaggatttgtataaagaacttccaacatccaatagtaggaattgtttgaaaaaaaaaaagtgggcaaaagacttgactagacccttcaccaaagaggatatatgtatggcagataaacacatgggaaatgttcagctaccaatggcgtgtataacttgcttatgttaaatgtgtgtagatttggtgttgttcaaaaggtgtttctgtaactaagtgcatggtaagtgatgagcaagtctcttggtgacttggtatttaggcatcactagtctttgttctaccaagggattatttaattcgtatgttcccctgagactgcagcatatacgaagatttccctctcttagcagtagccacaccttttccaaaatacacatgcacatttacatccatgtgtatgtgcacgtgttcacactcccacacacagttgtcttaaaggaccagaatccatgcttcttgagccagaggaacagacgttgacagcagaagctctggtgaagatgatacagtgtcctccatacagctgagtcaagattggcgagattttatatgcagaccatggatgacatggttgacatcctatcactgtcagtcagaagaaaatctttgcaaaagtgttgattcctgttaaatgaaactattctaccttttgaagttcctgatctgccactgcagcctctttctccttccacttggtcatcctttgctgtgaatgtgggtcatgtcagaaaacacgatattggctctccacaaactatccaaggtgttgcagactattttgtttttaatttacaccaagctatttacctgtggttctttaatcccaaatacagtgttgtgaacattttaatgatatgtgtgtaacatgtgagtaatggaattttgtttgtctgtaacctgctttttcatgttgcttcaagcttgtctgttatgggaaacaatatgtagtgctctagcatgcttgtaatgaaacacataacaattatgaccttcttatccatcccctgcttgcctgttccatgtctgattagcagggacccaagaattccagagagtccatgtacatatgtctatgacttgtgatattactgcataagaaacaatctggtgctaatggttggtccttggcatgcataggcatgggcatgggcacagctatggaactctctgtaaatatactgaccttgcttgtggtcagcttttgtggctttaccctgaactctgccctggcaaatatgcacattcatgcttgatgcttaccacttatcaacagatcctcttgcttgactttaacaaaataaatagtgtctcttcagatgaaagtagaatgtctttatttcctactgtatagctttgtaaaaagaataaaaataccagtgctgggcatgtagcccatggggaagggtttgaacatggtgttctgacttcaaatagtagcatttctcctccagaaaatagcctaagccaggcactgtggggaacacctgcaatcctggtccttagagtggtgcacagctggacccacagcacagtttttccttctatatacgggtgccaaacacatccttaaaggggcatagtagataaaattcttgtgatttagcttgattcaggctgctatgtattttgtcctttctaagtcaacagtgtgacttcttatcacacatgtcataattgtgtgacccaacaaaaatcagtggtaataatgtttagaaatataaatggtttccttgtagttaaaaacaaactaaaataaacagcatacatgttgagtgtactcaatcaaaaattaaaatcttaaatgcattaac

SEQ ID NO: 36289 - DNA, 1194 bp, Mus musculus
tgtgccctcagaaatgccctcttctcccagttcccagtcagttactgttaagtgtcctcctcctcagaagaggaccagctgtactcacaatgctattatcttcagaccttgctctttgcaaacctttctttgtgctttttctccttgtagttcttcctctcatgatttatctggctcatgggagcatacaagcctacagcgcacttctgaccacttcagctccatgggcagcatagacagcctcgaccacagctcccaactctacccatctggacacctctcatctgccaagtccaatagcagcattgaccacctgggaggccacagcaagcgagactcagcttacggctccttttccacatgctccagcacccctgaccacaccttgcccaaggctgatgcctcttccactgagaacattctctataaagttggcctttgggaggcctccagaccaggcagcagccgacaaagccagtctacaggtgatcctcagggactgcaggacaggccatcatgtttcatacctagggttcctggtaacagtagtaaaagtccaaggccggaggataatgttgaacccaaaatagccactcatgggagatccaattttgggcctgtgtggtatgttcctgacaagaaaaaagccccttctcccccacctcttggacttcctttgcgcagtgatagcttttctgtggcagccaggggccatgaaaaagcccggggccctccattctcagacttggccagtatgcagcactttatcaccctgccccatgtgcaaccccggggggaccatagaatggaaactacagatcgtcagtggaagctcacacacctaagcagtggaaaagaaataggaaatgtgggttaccagtcagaaggccacctggattgccgttggctatgctctgatgatagagcaggtaggccctcagggcctccgggcaggctccagttctccgatgtgcactttctgaagtcttaccacgggagccagcaccaacagcagtgcagtgacgagagcccaagggccccctcatcaccaagggaactgcttcatataactcctggtggcggtctgcaagagcctcctgaaccatctcaggatgacaaccctactcaggtgaggtggcctggttctgctcaccagaagctagatgacagagggcggagccactattttcctgg

SEQ ID NO: 36290 - DNA, 1179 bp, Mus musculus
ctgaaagtgactcatagcttgtagctgttaacatttgaattgttgtccctgcatagactccgctccccttaatgacagctgctccctgcttttatttcctgtgtttcttttatcttagtttgtgaggtaaccaggggaacagccaactggaatgagatttcaatagggcagtttgacaaagcagtggtatcttgtttcacaaggccccagcaatcttgtcctctttgagaagcagtgtcctgactttaatgcctgaagggacatggtgatatctgtattcccagtgaagattcttccacagacaaaagagagtggttacttttcgcagggttagctggggaagaaaaaaacttcaactatcatctccagaaagagcacatgttcttcatgatgtccaggtggcattcggggctcttgagcagtagggtgggggactctataagagccagatctgtggggctgtgacaagttgagtcagcatgcctaccttgttctttggtttccaaggtgtttgatgtttcagtgtgtccctttgcagtgctatgtagtttttagtatatatttgtttgtctctatagagttgtcacctgctttgtcctcctcagtgcacagttctgcacctggtgatttcatggataagggctggcatggatctgggctctaaggttttcacggaaggctacagactttttgttggggaccagtgttgcggtaaatcttcaacccaaatatgccccaacaatgaaaacacgactcagttattatgaatccatgctgtgtgcctagattgggcagctctactactacattatctttcacatcaatgagaccccttagaacttgcagtttctccaggccatgtgtttctgctctgcttttcttcttcctcctcctctgcgtcctctccctcttccattttctcctccttctctctcttcaccttctgctccaccttccctttatctgcccaatcatcagctctcgtttattatacaaattaaggatgggaagcaggtttacaggaaatcacctgagtgctgactctttccttgtttgcaacccctccccgaagaacggaattaacattaaacataattagccccagggcaacccacaatttagcagtgttggtttggccactcagttggattaaaaacagaaggaggcagagacacaagg

SEQ ID NO: 36291 - DNA, 1148 bp, Mus musculus
tagaggattacaggtatgtgcttccattctggacttatatttattttttccccctctcctttaaaaaaaattttttttttctgtgcgtcattaagatggctcagctgtaaaaggcactcgcttgctgcccagtctgacaaattgagttcagtcccctggacccacatgatggacagagctgacttcctgaattttgtcttctgatattcacatctatgctatggcatgcatgtatgttccctccttaaataaatataattttatttttaaataaattttaaataattaaaaataaattgtatcctccatgacaatgacaaataataagtatggattttcataatgtataaaatgtatgttattatatatctccttcctttgttgtggcattgttgcacagaacgagagagtgtgcatgctagacccataagttacaccctaatctatttcctttgctatggtttatttaccttgtccatttgggtcatgttatgatttgctgctgctgtggtttgtttgctttttttttttaaagtcagagttttactatatagcttaggctggcctgtaactcaaggtcttcctgcctcagcttcttgagtactgaattataagtacttgagtactggaattataaacattaactgccatgcctggctctactgtactttgatgttcaagcgtcacattgtaatttgacaatttatatagtaaacatagttaattaatgactttttcaattatgacttgtttctttttttcgtttttattacatttattgtgtgtatgtgtttgtgagagagagagagagaaacagaggcagggagcgagggaggggaacaaaaatgaacacacatctttaaggagctggttctgccctttcactttgtgggtactgaggcttgtactcaggttgtcaggcttggaggcaaatgccataacctgctgaaccatctcacgagcccacattttaatctctaaaatatgataaattgccgggcagtggtggtgcaagcctttaataccagcacttgggaggcagagacaggcggattccaggccagcctggtctacagagtgaattccagaacagccagggctacacagagaaaccctgtcatgaaaagccaaaaaaaattcataagttt

SEQ ID NO: 36292 - DNA, 1163 bp, Mus musculus
gaaaggaagaagtcaaaatatcactatttgcagatgatatgatagtatatataagtgaccctaataatcccaccagagaattcctacacctgataaacagcttcagtgcagtagctggatataaaattaactcaaacaaatcaatgccctttctctacacaaaggataaacaggctgagaaagaaattatggaaacaacacccttcacaatagtcacaaataatataaaataccttggggtgactctaactagtgaagtgaaaaatctgtatgataagaacttcaaattctcctctctagtagccgagcaagatgcccaaagggaagaaggccaaggggaagaaggtggccccggcccctgcggtcatcaagaagcatgaggccaagaaggtagtcaaccctctgttcaagaagaggcccggccacccggatatgagccgttctcgcgagagccgtccctctttctaagccagcgatccgtcagggtgaagccatgttcagctcgagcgccaagatcgggaagcccaatggcgagaagccagacgagttcgagtctggcatctctcaggcgctgctcgagctggagatgaactccgatctcaaggcgcagctgcgtgaactcaacatcaccgcagccaaggaaatcgaagttggtggtggtcggaaagctatcataatttttgtaccagttcctcagcttaaatctttccagaaaatccaagtccggctagttcgtgaattggagaaaaagttcagtggcaagcacgtggtcttcattgctcagaggaggattctgcccaagccaacccggaaaagccgtacgaaaaataagcagaagcgccccagaagccgtaccctgacagcagtgcacgacgccatccttgaggacttagtcttcccaagtgaaattgtgggtaagaggatccgtgtgaaactggatggcagccggctcataaaagttcacttagacaaagcacagcagaacaacgtggaacacaaggttgaaactttttctggtgtgtacaagaagctcacaggcaaggatgttaattttgaattcccagagtttcagttgtaaagaaaatgactgaataaagtgtcattcatagtaaaaaaaaaaaaaaaaaaaaaaaaaaaaagaagaggcccaagaactttggcat

SEQ ID NO: 36293 - DNA, 1180 bp, Mus musculus
ggaagaaaagttaccaaaatgcaaaaatgcacagggccctaatcatagggagtagtgaaaacggctagctggcaggtgctgaaattgcaaccttctcctttaactctgagcagcgagtgggcggggccgcgtccatcagtgtctaggtgcccgcaggccgccctaagggccaatggcgcggaaatgagagcccgggccacgtgatggcgggtggcactctggctttcctaaagcagtctctatggtattcttccaagcaaacccagggcccccccaaaagggtagcggcacgtgacaggccctgggactacggcaggttcccacgtgatcctggcctgcagtagcgtggttgcggtgaggttcttgcgctcctgaagggcgggcgcggaagtaagagcatcctcaggcggaccgtgactggcagcgaggtcgggaggagccaccaggcagtgaccgctttgcttctgcagctccgctccgctcattccgttatctcagcctttgcagtctgtacagaagctgaccaagttacctttgggtcttgagaccttggcgagtgaggcccaaactcgggaccaactcctcatccaccttgccctccctctcctccatctcttcctttgcacgcaccgaatcgaatcgcttgctcctttgggctggcctgctcggctgtgcctggagactaagttcgggtcggtaaaggtaactgtgggaaaagcggccccccagtggacaaaggcggaggcagggatagatcaggccccgcgggccctgggtgctgagcgtaggcaggtgagccagaagaacggtactgcggatttagaaggcactgtgaaggacttgttgcacgatggaagaatctgactccgagaaaaagacagagaaagagaatgtgggcccaaaagtggagcctcctctaggggagccggaaggatcgcttgggtgggtaaaggggattatgttgcacctgggagggagggcatgctaattgtaaagagtattgtgagatgcaacaacctctaacctgcagtgatgaattgctttaatttaccaatatggttgattgatatcatgcccttgatgacggaaaacagaatagaaacaccctttgcctggatgtgggattcctggtttatgcgtagtcttctaattgagacagttctgagttgttttctgtttt

SEQ ID NO: 36294 - DNA, 2583 bp, Mus musculus
gacaaatattcaaagcacagaaagatagatcagtagggagaagtattctaggaaaatacgtgggcagtgacaggcaagagcagacctgggagcaccctgtgaacaattacttggataaggtgttagaactgctgttaatcccaagcctcgttcagagggcagcctgttgaaacatcactttcgatgggctccactgtactgttgattcttttgtttacataaggcaaccattcagcgtattacctgatgagaaattgcacactgagcacgttatagagaggtgaggggttgcactaaaggaattttgtttacttcatgccattttgggcatttgttcttctctttctaatgggatggaagaggttttctttctgacactgacatatagaaagcatttttttggatgttttacaacttctattaatacccaagccatttattttatttagatataacaacaagatgcttaatatacatttggttgcccaatcagactgttcataatattctctggggcataaaaccttctgttcctggccctggacctcatatctacctcttcgtggcatatttcctctcctggggaaaaaggagaggggctttgtattagtaggattggacacagcctctcgcctaaaggttttcttcatatgaaacctttatttcttggcagatattcaaaatgttctggcttgaacaatttaggttactacctcctgtggctgtactttctaactaaagcctagaattctaccatccagaaggggtcctgtctacttctacccatccctcacgttttacagatgaggcaaatacgggtcagattctttctccagataattccttgaggccttacagacctgtatacaccgtctcccagggatcacactagtaaaccaaattaaagaaaaagaagttatgtgattggttgcaatatttgtccaattttatgttacacttcagaaaactttaaattcatgtatatttggtgacaaagtaagtagggtgtgcttatggtcatgaccacttaacaccaggcacacagtgtttcaagtcacattttttgataattctagatttgttttaatttaccttgtttcaagtttcaatgtctttgcagagcataaattctccataagttaaggcctacttgtacttttcaacgtggcatgtaggttttactgttactgctttggtaagggatctgtcctgactctgggtgtacaagttccaggctgtatactaattactaagcactaatcaatatctagggctagtctactaatggggaccacaatgtaaaacagattgaaaaatgtatattcctaccatatatgggcttaagcttataattgagtagttggtacaatactatagaacagagtccaaagggttatgtacttctgttccactttggatcctaaatttgttttccagagattggaattggcatgtgccccttagacttcaggatattgagacatatgtttattaatgagcactatgaaattatagtactcataagggtgatcagctgaggatcccagatactgatgttcctagcatctctgagcctttattcaagtatgtttctgcagagtcttaatagactttgcaaatgctttgtccattgtctttagccaagaaccaattctaaccatattctctttgctctttttgttcccaaatggcaaaaatctttccagttacaagcatagtctttacaaatgtgtcatgattaagagaacttcgcagagtaaatgaactcaaacagtacagtgcagaattactgcaccaaaagcacatacgtttgctacatagtgggatataaaggaaaccattccacttctcttggttaacatctgaggtttaactaagtgtaatgggcttacaacagccaaagactgttaggatgacatttgcctaggatatggaaattgtgtctggatggataatattcaggagtttattgtagtgaagtttctccctctgtagacatctggcagctgaacataattgttggtaattgccattgtaaagtgtaagaaatgtaaactggtttgatggattagtggagttcattatgtacaaacccacgaatgtttgtaaagagaatttctttttaaataaactttacatgttggaactctttttttgagattttcaggaaaatgtgaaggtagaacagagttcctgctgactctacattatatatttgtttggtatacttgttacaattagtgaaattataccgatacattaatattaactacaatcaatgctttcgtcagactaccttggcttttatctgctgttctttttttctgttttaataccgccttcaaaatacaacattgtattaataataacagctccttattctcctcgttgtgatagcttcttggagttctttgttctcaaggaccttggagtatgtttttcagttggggtgtattttatattcttctcatgaaaattttctcattaaaaaaaaaaaaaacgaggtcaatgaaagctaggcatggtggcaaacactttccttttaatcccagcacttgggaggcaaaggcaagtggatctctg

SEQ ID NO: 36295 - DNA, 1581 bp, Mus musculus
aggcgacatcaacgcggccattgagaggctgctgggctctcagccatcctaattacgtttctgtaccttgaaaaaaaatgtatcttatttttgataatggctcttaaatctttaaacacacaaaattgtgctttacttttattttgattcttttaaatctgtctacctataaatctaataggatgcattttaaggtggagtccctccctccctccctccctccctccctgctcctcctccccccaccctctcccttcccttccagcctgccctctcccctctttgtttccttcattcctttcttttcttcttttgatttccttccttctctgatttgaatggtgggaatcaatactgtttcactcaaaggtgttgcatgcaaacacttctctttattctgcatttattgtgatttttggaaacaggtatcagccttcacagttgggtgaacaagttttgtcctacagatgtccagtttatttgcattttaaacattagcctatgatagtaatttaatgtagaatgaagatattaaaaaaacagaagcaaattatttgaagctctctaatttgtggtaaaatattgcttattgtgactttggcatgtatttttgctagcaaatgctgtaagatttataccattcattgatcgtttttgctatttgtacacagtacagtaagcacaattggaattgtacatctagaagtattactgtagaatctctgagcagaatatgtgtaaccaaaataagaaagaatataagaaatattcctgaagctaggtatgtctcacaattttgtagaatcttacagcatatttgataaatttctcagtgaaaatgttggctaggcaagttcagttaaaatatagtagaaatgtttatcctggtttctctaagtatacattaaattgtacagaaaccttacagtgtaacattgtgtcaacagttgcagattgattgtatatgaccttaatctttgtgcagcctgaaggatcagtgtagtgactccaggaaagtgctttttatctaagagttcctcagcttctcccatgaagagaccttcatatgcattttgatttgtaattggaaatgtaacttttactggaagtgtcatgtgatgtttgcattacttttaactgctatgtataaaggaaagtgtatcttttggctctatcagttatttctcttgtgcacagggaaaaatgcattaaaatgactaaaaaaataaaaaaataataaaaaatggagaaagctcttttattttgccttttggccctagaatcacatctagaagggttagctcccctcacaagtgtttatttacaggattgtactatgggaaattatttttgacatgcacatttagatgttctaattattgcccccaaaggttaaccaattattaattagtatttcccctgcccccccaccagtatattgggaatgtgactgggcttattttaaatagataaaatatgggaaacgatagtatcccggtgtcttttagaaacaatatgttgttttatgaggtggggtactgggaggattgttaaaagcaggatctcactgactagcttttt

SEQ ID NO: 36296 - DNA, 1170 bp, Mus musculus
ctgggttctcagatagtactatgtccaattttctgaggaaccgccaaactgatttgcagaatgattgtaccagccctcaatcccaccagcaatggaggagtattcctctttctccacatcctcttcaacatctgctgccatctgtcccaggcagcccctgggttcctgtgtcctgagggttcctggcaggttcttctgagcagcagtgatgatcctaactgcactcaatggcctatccacactcctgggaggctcactccctcctggtgctatctgggtatggagccctgtggcagaggatctgctatagtctgaaacggaaactggaaggctcctgttccatgcccctgggttcctgtgtcctgagggttctgggcgggttcctctgagcagcagtggtgagcctacctgcactcatgggcctgtctgcactcctaaacatttctttttatgttattttgtgtgtatgagtatttggcttgcatgtgtgtcaatgtaccaatttcttgctacatagccttgactggcttatgtatacaaggctgatctggaactcatagctatccacctgcctctaccacttgagttgtgagattaaaggcatgtgccacccaccatgccctgcccactcctttttgctatatattatattttcttgcattccttaatttattatgaatttagggctcgaaacaacttaattatactgctgtagatcagaagtctggtgtaagtttcatctaattaatcaaagtgctggccagctgtattcatttccaggggctctagaagagaatttgttttctgctccttaagtcgttggcacaatcgagttccttacaaaggtaagagtaagatccccgttttcctggtggatgtctgctatgggtgttcccagcacttagaatcccttcattcctgatcctttcactggcttccaagccggttgcgggttgaacccctctcacacttaaaatttctccatttcctaattctcatccatcctctctctgactcagagagggaaagggcttctgtgtttaaatatacatccagtcagagtatgccagtcagttaatccagaggaaattcttctgtcttgaaatctataaccaaattacatctgcaggtttttttttttatcttgtaaattgatacatacagtcacca

SEQ ID NO: 36297 - DNA, 1176 bp, Mus musculus
tgtgttgcataaaataacttataaaaactttgttccttatagagtactattttattaaaaatggcattttcacatgagcaaattcaatatataaaagctagtgtgtaataaaataaacaaatgactgcttttcattttcttctaactaaagaaataatagtgtatgttaaacccttattttatggtaatatatgttgagatatcatttaactaaggtattttgaaatttttgccttttatacataaaggaatttatttggcaattattagttgaaagatttgtggacagaacatttaaacctgaagtgtaacttaattggaaattgattagaaaccaagaaaaattttcttggaagacaacataaatcagtgaagtttcaacagaaaaataaatctgatatttttagaaagagatgtatttcagcatttacaaattctggagtagctataaatgacaatccccaactgccaaatttcttctaagaataaaacattactatggtaaagaaatgaagtttaattaaataaagattagaaattcttgtctatgatcatatcatcctgaatgtacctgatctcatctgatctcagaagcgaggcagggttggacctggttagttcttggttgggagacacattaggaattccacttttcactttctttccttacccctattttatcttagtggtgtcttaatcccacactgatgattaagtagtaggctactgtctaaaaacatcactgtccatggagctaagattagtaatggatgaataatggggcttagaaatagaccattagagggaatgcatgaatgtcactgagaagggaagtagaatagatatcatgggtggatgcggggagggtattgggtaggaatgggggtgaggatggaaactggagggaccacttagggggaggatagagggaaagagtagtgggaaggacaactggaatggggggaagcatctctgggataagctagaaaatgagagcagaaactcccaggaatctataaaggtgaccttaactaagactcctagcaaaggggtatatagagcctcaacaggccatctccagtaaccaggcatgatttacaatggagggattgagaaactaacccagccacaaaacttttgccttacaaattgtactttctacaagatatgctgggg

SEQ ID NO: 36298 - DNA, 1198 bp, Mus musculus
tgcttttgggaacacttgcatcctaccgggttgcttgtgtgtacctttactgtgtactggtttattgatataaaagagaagaaattattgcaatgtataatgaaatagatattaaaaacatgaaaaagctactgtagttaatggatattgcagaattcttagaaggaaacattatcattcataattttaaacacattaaatttttgtaaagatagtaactgtagacaagtattaagtcacgttaacaaagccagaaacaaaagcgcataccttctataaaattcaggaataggtggtgggagagacacattagcagcaccaagcatgcactacaccagtcttgcagaggaccagagtttgagtctcagaaactgcatgcccctcccccccatagctgactcacaactgccactccagctccaggtaatcagatgcatcttggcctcacttgcacatgacctcacataaatatatataattaaaaataatagaaaataacatttcatacatttacatatcctggtctctatgaatttgcataaacaacagcaacaacaaactcctgccttgctctgattgaaggacttccaggactgctgtctgctcctgaactacgtgtatcctttccttgtattttgaattaagaaataaagaaataaccccttattgttgaacatgttggttgtcccctttattttttcctctaggggacatatgaagcaagttattctttttctgtatctttttcttttcttttgtaaacattttggtcaagtttgtttaaaaatagctttatagagagcttctgaggcggcgccatcttcggctccagacaaccagccaccttcctggtgagagcacaggggtccgcccggcccgagaggtttctgcctcaggctctggcaagagccaccttggctccgggactctgcggagggcaggctgcacgggtgacagtgtggaatacagaggccagccatttctgggacaggcgagagccacagagcttctgaggcggcgccatcttcggctccagacaaccggccaccttcctggccaaagcaacacagcttctgggaaagatcctgttttgggccttcatcttcagccaggaggaggtccaaacaccacataactgtgcaccttccctgaaagaggagagcttgcctgcagagactgctctgaccactgaaactca

SEQ ID NO: 36299 - DNA, 1198 bp, Mus musculus
atacgatctcaagtatataggactggacgggaacatcacctgcttcgtgaatggtgctgggctggccatggctacctgcgacatcatcttcctgaacggagggaagccagcgaacttcttggaccttggaggtggtgtaaaggaagcccaagtctatgaagcattcaaactgctcacgtctgaccccaaggtggaagccattctcgtcaatatctttggtgggattgtcaactgtgccatcattgccaacggaatcaccaaagcctgccgggagctggagctcaaggtgccactggtagtccggcttgaaggaactaatgtgcaggaggctcagaatatcttcaagagcagcggactccccatcacgtcagctgtggacctggaggatgcagccaagaaagctgttgccagtgtggcaaagaagtgatgttctccctggctcccacgaagaagggcatgtccctgactactgtgaaagcaattgttttctcactgggaagggacacacacaaggatcatcatgtgaaaaatattaactctgaactttctcaaatacgttatccagagtgcctaaagctgaatttatactgtagtcattgtttaaaaaaaaaatcactccttacaatttcacatcttctcttgcccattcagtagcagggtctaccagctctgggccacagtcagtttagccaaatagtgtgcatacatacagtatttaaagccagatctaggttcattcacaagggcatttattctacattagaaaattttacagaaccctcaagttcagacaggctgatatttaacatagtggcttccagaagggtacagctaagacacccgagcttctgtgaccagtggtctccactggcccctaattccagtacattaagaaagcccatgaacattataaagtgtggcttatattgggcatcccgtgttgatatatgtacattgcacacattttaccctgtgccttaatgttgaatctactgtttgcctcacactgagttactgccagaagccttagtcatgggtgtgaggtggaaggtttcattttgtgtcagagttgctgaatgttaatctatttcataaagagtcacactaatgatctagctgctggtagcggccaggctttcccctcttgtcccctccacctcacatctatcagtttgccacagaaagatgagagatgcca

SEQ ID NO: 36300 - DNA, 2492 bp, Mus musculus
tttggtttcagtagacctttaatttggacatgtggaggaatgaacatcattgttttgttctggagagaagttcctgatagtgtttctcccctctcacccccaaattgacttagatattaaaatttggtgcttttaaaggttttaaaagagtgattagcagtgcttcaattaaaatgacaaaggagacctcttacggtgtttgtccctttatttcagcctctcttcctctttcttacctctgatggcctagggcaaaggtgtattctatctagactgttaactgcactcagcataatgtcaaggccttgaggaacgatccacaacctattatatttgccgcccccccattataaagttgttccaaggatagcagaagatttttgcctgcctgaaaagggtgaaagtcaaagatgatttctgttactgctctccctgattagagatccaaaggcctttgagaagactgtaggatgtgcaagtgcacactagagttcatgtagtcctgtggcaaaataacttaactcttaagaaagtgcatgtgaatagcaacttggcattgtattgtggataatttgaattgtctatcctattgtttgtgtaaaatatttacactgtatcagtagaatggtatttttttttacagcaagtaaaacattgaaaatttactaatggaaatcaggctcaagtttcattgtccctcccaagataggaaggaacaaataagacaggacaagacaaatgatctttaaaagtgagcgcaaacctatgccatttgttttagattgacatggaagaagaaacaatagagaataaaaggagttgatagttatgttcaaattagatgcatttaacaatatttttggtgcatgcatagggtaaaaacagcccagtagacacttctccacccaaattcttccccagtgctttgaaaactttgtatattgtggagaattgaaaacaaatgtactgctacagttagaatattagctaaggccaattgccccttacccactgtactgttattcttacgattacttttgaaacagtgactgtatgtatgtagcccagtctaacctggagcttattatgtagcctaggctttcctggaagctcacaagaattgagcttgtaccatcacacagcttaattcttgttaccatttaagtaaagaaagcaagtatatcagctgctggggtaatattaatgaggggactgacctgcgtgatccgtgaagagtaacttgaggccataaccacagatccactcataattcgggtgactcagttcctgctaagcaccaggtggtagaaatgaagaggataaggttatgtgaggctaattggttatgagatgcatttgggataaaatgaaggaagtggtgttgaggaaaggaggaagaaagaggtttttatcttgagtgataaatgtgaactcagatgtgactgatttgctgaaggagggtctccgttttgagcccttgttattttgacaccgaagcatgcaaactgaaccaacacccaccctaccctgtgctctactccgacccaccttcgctttggctgcctcttaaggaatgctaatggatttgttgtttttcttaatactgtagtgttatgtagtgtgaaagattcttttaacagtggaatatattatggtgtcctgctttttttttaatgaaagacaaaacaaatatggatagagtttaaattctgttcaacacagcagatactaagaattgatttattaagacatgaaatgctgctttctcttggaaatgtgattgaatatttataaaagagctccacctgggccggggaaggctgggttggtggtggttttagtgggctagaacattactatctgaataaacaaatgtgctgcttcttcctgtagacttggaatagtcatgtccttgctttccctaacaattgctgacacaagactttgtatttctgcctgtcatctgtctctcaataaatggatcaatttcatcccgtctccattatgcctgggaaagggaaggaaaatatgtgttatgttctggcttggcctctttctgagctgctcacactggtggttcatctgatagttctgttttctttctccttccttttttctttttggtttgttttcagacagggctctctgtgtagccccagctgtcctggaactctgtaaaccaggctggcctcgaactcacaggaatccacctgcctctgcctcctgagtactaggatgacaggcgtgtaccaccaccaccctggcaacagctcccctttcaaagcactttattgccactgaggggttctctctggtaagacttgctcagaaaagacaacagtacttgttttcattgtggaactagctacttaacattcctctgacagcatattttttttgggggggtgcatactattctagaggccaattggtcagcagtgttatcttgttattacacagcagctgctatgtgaccataaaagaaacacctg

SEQ ID NO: 36301 - DNA, 1104 bp, Mus musculus
ttgtattctgtctatgtggccaacttcatgtgtgtgtgttaaaaggttgccttagatgtatctaaagtgataacttcttccttaagggtggcctaaattcaacaggattactactagtcttcttcacgtctctcctatgccctgcttcagttacttacgaggctcccagaagcagaggaccgtcagctgtccctacatctgtctcacgtacacctctactcattctctctctgtagtgctctgttcctgtcacatcactctgtttttgctatcgttcatttttttgtcatccaacaacatccaacatggctccttcactcagcttctgcaaccagactttacctgcctcagtttttatttgaaaaggttctgtatttctattggtttggtacatcatatacatgtgtatctttaccccatttgaggtagtatctgcctgtagtggaggccagatgattgtgagctgccatgtctgtgtcaagaactgaacccagggcttctggaggagcaaatagtgctctttcctgctgctatgtctttccagccacaattctacttgtatacatagtacttagaattctgcttttcttttttttttttggagaaaggagcttttgagtgacaagaattgttcagaggttgcttctgaaaagccacatgtgtaaaaatgaaagcatgtgtgggagggtgggagtgtttcaggaatcaataatagcttcaggggacttcctgagccaatggaaaaaagagacccctgtgcaaaggaggtttggagattaaacatacacacacggctgctgtcacactctcttccccccttacttaaacagctctttcttttttttattacgtattttcctcaattacatttccaatgctctcccaaaagtcccccatacctccccccaccactcccctacccacccattcccactttttggccctggcgttcccctgtactggggcatataaagtttgcgtgtccaatgggcctctctttccagtgatggctgactaggccatcttttgatacatatgcagctagagtcaagagctccggggtactggttagttcataatgttgttgcacctacagggttgcag

SEQ ID NO: 36302 - DNA, 1372 bp, Mus musculus
taataggaaccatacactgaatatcattttgagattttattaatgatgggccattattactaataatactaaagtcatacaaattactaacttttattgcagaaaatatggcattgttgtcttctaagatcactcaggaccaaaatgtatctgcatattaaaaaggcacagaccttttcaggtaaagcttagagaatgccgtgaaatactcacattaacttcatcgcatgcatgaagcagtttactaatgaaaatgtatgtgtgtaaatcattgttttcaatactgaggaaaacaatttttggtatggtacttagcccaggacctcacacatgcgagcaagtattctaccactaaactattatccatagaccatgaaactattttaataagaggaaattctattcattaacttcattttctgagtgaaggcaacaatacaaaaccttatttcttattagctgctgaacacctctgccagctaatctttagggtcgggtttgggtgcttctctcctggagtccagatttgtatgcaaatggcctcattactaaagaaaggagatgttacttattgtctcttccgcttccctgtgggctcctggcttccctgtgtagtgcatgcgctatcagaattgcttaatgtgcttgaatgaatgatggtgattagtgttatttatggctagaaaagcatgcttctatttaagctgtaaaaaggattgtcgaatagttactgtaaatatatgttgacatagtaaagcttggaatgtcttatgtccctggtgtattatcatctttatggaaaaattcattttggtttctgtagagcatttagaaaaatgagttatattggaaaaatgaattatgttggtgatttgaagaagtatctttttgtgttgtctctttgttcagcagtgaaattttattctcagtgttcctattctgcattgtttacattcttaaggtttttattttaatcatccataagtgtgagacatgtacatattatttttagcatctcagtttgaagagacatacagttaaacttgactttgataaatacttctaggtcattgtctgtgcgaacagcagattgtaagcatacgcttcctagtgatgtagctttctgtcattgtgtccttggtatttattgaacatccacatactggtggcacacagatttgttccaataactcctttaattgagctgtaattcattttaaggctttaatttgattttataattgtcagaatgtgatgtttagcaataaaagaacaaatgtaataaaccagcattttacgtttatcatcttctgtatcatattttttacatttgaccttagacaaaagctattgtcttgtcagtgtccttttt

SEQ ID NO: 36303 - DNA, 2028 bp, Mus musculus
tttttctgtgtagccctggctgtcctggaacttgatctgcagaccaggctggcctctaactgcctctgcctcctaagtgctgtgattaaaggctatcactgcccagctttaagtggctatttatttatttatttatttatttattggtttgcttaggggttttgttgttgttgttctttgttttgtattgttgtttgggttttgggctttttttattgggggggggtgtttgttataagaaagaatgttagagacttaaagtagagagacctacagtaatgtcacctcccagtgacttctcagaagatgatttccacttgtaatctcatagctagctccttaactgatcgttacccaggtacctgatttctctttctggagctctggctattgttaatgcagtgccctgctttgccttggatggtcaatggattttaaactctttcctggatgctacccttacttcagtaattggagacaatgatgtcaaagatctgattggatttttcatcttgcttggtggcagtgtacttttggctgccaatgtgacactgggactctggatggttacagcacggtaatgtttgctctcatccaacagaattaagaagtaaagctacatggcaatatctgttgccattgaaattcttactagttatgaaatgtaaagtgtttccttaaaacaccttggccaacctctttgagctcctaatatctagagaacccaaaaactctgtagtagagggagtagaagaaatgaaaagcataattcctgactatatcctactttaaagattgaatgtgcaaactctgaatgtttgttgaataatttgtaaacaagtgaaaattcattcatgtaataccattttgtgtgaccatatagcattttggaatagtaaaaggaaaagcagaatcttgtaggaaaacgtgtgtgtgtgtgtgtgtgtgtgtgtgtgtgtgtgtgagagagagagagagagagagagagagagaatgcgtgtgtatgtggtatgtgtctgcgtgttctactagtgtttgaaagcagggccttacttatgctacttaggctaagcttgcctgtcccaggtaaaagttactgaaaagtgccattaaggtgatgtgctggtgcacacctataatcccagcacctgcctctatgtgtttggagggctaggcataaggatcgtgaattcaaggccatcatctttagctacatagtaggttccagaccagcactggccacatagcaagaccctttcgtgcatgcatacatgcacaggcgcgcacacacacccacccacccacccacacacacacacacacacacacacacacacgcacatacacaaaatcattaatgattggaaggaagctagaccttggttgaatggaaagtagagcaagtgctcttggttttataactcttgtctttatcttatttgaaaagtattttaaagtttaatggtgtattattctgtactctggttacaattctatgaaagtatctgctaacatgaaagcaaaaactctgtacaagtgctatcaagtaaatgagcaatgttgaaagcagataaggcttgtgatgtgataagacagtttgtcgcacaagtattacatttttcatagtgtaagttacactcaacatttttaagccttgttatatatagagtatgctgcaggaagggtctctcacggcagcatgtgagctcaggcagttagaggtgaacttgagaactaagctgagtcctctaacagatcacaacagaacttcagcaaacctacttaaccacttcctagagctttgcagcttagaactcttccagagtagactttttcctttgtgctgcaagaacattcaaccttgagccatactctgtcgtcaccagcacctagtatgtttctctctgttggcgggattaaacacctcctctttgttttccatctccccctaagctacctctgtgagtacataaaagacttggtagtctagtgagaatggctgcacaaatgaaaatttcccagaatcta

SEQ ID NO: 36304 - DNA, 1194 bp, Mus musculus
atcttacttgtctgatatgatcattaaaataaatatatagctaaaacaaaagctataatgccttctgtctttatctattttgtgttatttagttaaaacctccatgtttcagatgccacattttatctgagaatctacaaatgcatagtagtatgatatcctatatagcaaaacatggaatattgaaatttatagttggtgcacattaataaatagcacattttaatgtcaagatcattccttatctgctgggtgacaagaaaagcatgaaggaatgcaagttagatttttcttgttaataggtacttttttttttttttttggtattttttgagacagggtttctctgtatagccctagagctcactttgtagaccaggctggcctcgaactcagagatccacctgcctctgcctcccaagtgctgggattaaaggcatgagctatcactgcctggctaataagtactttttaacattgactgatattatatttttagcatacgtgtctacctgcccggaaagcagttgaagctactcaagtttgtagaagcaataaagattgcaaaagcggcgcaagttctagcttctgtatagtaccgtccttggaaactcacacccgactaatcaaagtgaaacatcccccgcaaattgatatgctgtatgtagggcacccactgcatcttcactacacaggtgggtacttctggggagctcttccaagtcgttaggatcacatatggtctcagttgctttgcttccatttaggataaacttggcgacttatcagagtcttattaacttgttcttaagcattacttaattaatgattgattaatcatttttttcagccactgatatgctttctgtttctatcaatgtgtctatactccaaatttcatataaattgaatatttccaagttgctgatttcatgtagcatgttttcaaggtttatcctttatcaaccatagtttcatttttcatttatcagtagatgaatatttatatcttatgttcctctttaaaaagcattgctttgtgtttattttgcttttgtttttagacagagactcaccatgtagccctggctggctggcctagagcatgctacatataccaggctcacctcaaactcatagagatatgcctgtggctgcctcctgagtgtcaagattataggcacacactaccac

SEQ ID NO: 36305 - DNA, 1180 bp, Mus musculus
ctgctatggaactttgtctcaaaaaaagacaagaaaaaaataaacataaaactagaaaatactcataaagagatattagactaaaatgcaagtttcaaaatcatgtttgtaagttttgagaaatgggtgtataggcaagactagaaggctatggcagtgcattggaaatagttctgttttctgtttgcagagtgatggggttagaggcttctatttccctattttgtttttaaagacttatttatttgtattttatgtgtaggaatgttttagtatgtatgttcacatgtgtggatttcatgctcatggaggcttgaacagtatgtcacatcctggacctggagttacagtgtgagctacagtatgggtgctgggaatttaacccaactcccctacaagggcagtatattgctcttaaccactgagccatcttgccaaaccccaattttcctgttttaggcatttttagttagcattaaaatgataattcataaatgaaggaaaggattttctccagagagaaatgggtgttccatgttgtgatggtttgtatatgcttaggccagggagtggcactattatgaagtgtggccttgttggagtaggtgtgtcactgtgggggtggcctttaagactctagtcctagcagtctggaagccagtctcctagaggactgcagatcaagacttagagctctcagcttctcctgcaccatgcctgcctggatgctgctgtgctccccccttgatggtactggactgaacctctgaacttgtaagccagccctgattaaatgttgtccatataagagttgccttgggcccagcgtggtggcgcacgcacgcctttagtcccagcacaggcagagggaggcagatttctgagttcgagtccagcctggtctacagagtgagttccaggacagccaaggctatacagagaaaccctgtctcagaaaaaaccagccccacccccctacccccgcccaaaaaaaaaaaaaaaagagttgccttggtcctgggtctgttcgcagcagtaaaaccctaactcaaacagaaattgctaaggggactagagtattgtgattggcttgaccatgcttttgtctgaaagaatgtggatttggaaaacaatggaatgcttttgtggggcttaatgggctgtcctagtaggaatctga

SEQ ID NO: 36306 - DNA, 1239 bp, Mus musculus
tggctcacaaccatctctaatgggatctgatgccctcttctggtgtgtctgaagacagctacagtgtactcacatacattaaataaataaatcaatgaataaatcttttttaaaaaacctgaataaacaaaactattaaaattgccttccttgatatttaaactaatttttcacaaagctaaaatgcgataaataagatgcagacagtagaatagaaaataagtaatgtgaaataagtgaatgccctaatgttaatagcatttctaactatagtaaacacgagcaaaactgggctgtactaaatgagcaaatagagaggaacccctgccccctcagccctttttttaaaaattggcagtgatatttagctttttagggtgtcagagtatgaagtttgttagaattacctatgagtcaatcagttcagatagggaaataaggctgagctattggtctttttagacattgtttaaaagttacaaaatgtggccaattactttgttagtccatgcactgtgaagaattgtatacttacaagtttgtttttgttcttgttgccaggttcaattttggaatggtgtttggcgtgattgccatgttcagctctttttttctccttggaaaaacactgatgcagactttggcacaaatgatggctgactctccctctccttattcttcctcttcctcttcctcctcttcctcttcctcctcttcctcttcctcctcctctcttcacaatgaacaggtgttgcaagttgtggtaagtacacgcttttttgtcttaactgcttaaacacagatattattttttctggcttaagtagacattaaagtaaaatgcctcataatttttcagattacacacttaactaaaaaccattaataaaagattagcagagagccgggcgtggtggcgcacgcctttaatcccagcactcgggaggcagaggcaggcggatttctgagtttgaggccagcctggtctacagagtgagttccaggatagccagggctacacagagaaaccctgtctcgaaaaaccaaaaaaaaaaaaaaaaattagcagaaattgtcacagtatttgatggcagtggaaataactagggcagagaataaatggatgactaataagacaggcagtcataaccgctcccccttacctcaggttgtcttcttgagatgtgtaatgattatttctttcaaggagcaagcatgctgacttgagatctctatatc

SEQ ID NO: 36307 - DNA, 1173 bp, Mus musculus
aggtggcaccaaccttgactttcagatggagcagtgcaactacaaaaggaaaagtgatggtatctacatcataaatatgaagaggacttgggagaagctgttgctcacagctgttgctcacaggttctccattgagaaccctgctgacgtcagcatcatctccaagaacactgacccacaagggagctgtgctgaagttcgcggctgccacaggagccattcccatcgctggttgcttcacaggtggaacctttcctaaccagatccaagcagccttcagaaagccacggcttttagtggtgactgatcccagagctgactaccagcccctcagagaggcctcttatgtcaacctgcccactattgctctgtgtaacccaaattctcccctgtgctatgtggacattgccatcccatgcaataagggagttcactcagtgggtctgatgtgatggatgctggccagggaagtactgcgcattcgaggtactatctcccgtgagcatccaggggaggttatgcctgatcattacttctacagagacccagaggagattgagaaggaggagcaggctgctgctgagaaggctgtgaccaaggaggaatttcagggcaaatggacttcaccagctcctgagttcactgctgctcagcctgaggtggccgatgggtctgagggtgtgcaggttccctctgtgcccatccagcagttccacacggaagacaggagtgtgcagccagccattgaggactggtcagcagctcccacagggcaggccaagaggattggagccaccactgtgtggttctgagctgctctgtacacatctgagcaaaggggaaaaatggtggaaggaaaataaagttcctaaaagctgaaaaaaaaagagtagattgctatttgtttgtaaataatgatggggattcactgaaataacagcattaaggaggttgagaaccactactctagggtcttctgaaccattcatcctcaatgtgtgatctctgtatcagcagcagcagtagcattatattgagaacttaccaatagtcaggattctcaagtccaactggaactgttaaatgaggaactcagaaagtagggatcatcacctctctttaacaagtcttccagatgagtcttacatgtgctcaaatatgagaatcactgct

SEQ ID NO: 36308 - DNA, 1169 bp, Mus musculus
ccgcagcgctctctgccgctgctgcaaaagaaaaacggagcgccttaggtcccctactcctaggttttgaggtcactgagttggaagaccccagtataacttttgcttcctgtccatggaggtgagcgggtgaaattcaaggagatcagcggacgctgtaaaagggctatctgattttcctctcccgggatctgatgatcggccctgagatacccaccccagtgtcagaaacccaaacagtatacccaaacaaggcaaaacagaatttccgcggacacatcccagcaccgagcttttcacagccgccactgtcccagaatcaactggcgatctaaaaaaataatgcagacaagatccattccagggtatcagcgctcctctccagagtggaaaatcagttcctgatggtggcgcgtctgtgattcctctttcttgacttttcgctgaattctatcctcgcagcggactttaggggattacagaatgataggctgggtgtgtgtaatagttactgagcgagtgaccccatttctggaaagcatgactgaaacgcgggggtggaatggggcaggctctgatgagtggtgtacttggcggcagccactgcccccatcggcctccgcagtgtgagaggtgggtagggttactggttacgtcagtaaaactcgggctcagtttggtgtgagatgcgggacgctgacattctctgggaggggggagagggggagggaggaatccgttcagatcgttttttctaatttttctcccctgtcacctccactaccatataaaaatatttacttgttcttaaatgcaggaagagttgtaataaagcttacaagttcatgcttaataatttactactggataatgctgttctaaaatagcaaagacataggtatatgttacttttttttttaaaggaaaggctggtgtaaaaaaggaaatcgtgtttttacgactggcagaatacaagaattttatttgaatttagagccaatatgatactataaatctttaataataaagttaaacttagaatgcttaaccgtcatttgaatgggtagtgtggaaaaacagtatggcaagggagcctcttcattttttcttaaagaaaaaaatttgcatttaaaatacagctataaaggtggttaaaattgctgaacctg

SEQ ID NO: 36309 - DNA, 1149 bp, Mus musculus
tttcaaacctaaaacttcactctcctttcccactccgctttagtatgcttgcttggcagctgtgtgaaggatagaaccatgtccactccagaacagttgtcagtccctctccccaacaaacatgtctttaatatatggcatttgttccacctgatatactcacacgccagacacagtacagtactctaatctgctattttcaaatgttctcacacacttttgttgttcaaaactatcctaattatgtaaaatagaaataatgaagacttgcaaataattagtgctagtattgtgtagaagctgataggacctaatattctcctaacatttaacttaaaagtataattacttgtatattttctgtttacttgataagtcagcaaagagtagttttgtgtattaattcaagggattcttatatgctatactaagttaagattatttggttcctaatgagagtcattctgggctaacaatgggttgtctctatatttaccttaacaggaagaaggcagtatcaaagaaattgcaatcacacatcatgtgaaggaaggacatgaaaaggcagatccttcccagtttgaacttttaaaagtattagggcagggatcatttggaaaggtaagtcatagttgtttgctataaacaaagtttatagaaattccatagaagtagaaagtagagtgctaatcacacaaggctagggatagagggaggctagctaatgggtaccaacattagatacatagaagaaatagggtctcatgttctataggacagtagcatgactagagctaacaacaattcattgtatttttttaaagatttatttatttatttattttatgtatatgagtacactgtagctggacagatggttgtgagccatcatgtgcctgctgggaattgaacttaggacctctgctcactcgggccccgcttgttccagcccaaagatttgtttattgttatatctaagtacactgtagctgtctttaaacataccagaagaggatgtcatgccagatggttgtgagccaccatgtggttgctgggatttgaactccggaccttcggaagaacagtcagtgcttttaactgctgagccatttctccagccccattatatgttttattagaagagaagtt

SEQ ID NO: 36310 - DNA, 1196 bp, Mus musculus
cataaaaagacatgaaaatagacaacttaggaaggagacgatggcaagaaggtaatggagaaggtgaatgtgattttttaaaaaactaaagaagcaagaaattgtgatgtaggactggggctgtagctcagtaggagagtgtttgcctagtttgaatgagaccttaagttacaaccctagcatccggaaaaattgaggcactcaggagaatttggttttgataaagcagagccgacatttcctgtggtatactttgaatgtgtggagtattctctagctgctatattcatagtagagttagttgtcatactgtgtatattacatgctccttggaaactagcaaacgacaaaatgaaaaagaaaacaactatcctcttacaatgaaatatcactatataaccactgtttgaaacttcaatattttggacaaaatacatgtataatatagtacagcatatatgtgtgtatatatgtgtgtgaatatataaatggagtcttggctgtaataaaggaatttggtttgtaattctttgtaatgtttattttctgtcatttaaatacaggttttcttagttaaaaaaatctcaggctctgatgctagacagctttatgccatgaaagtattaaagaaggccacgctgaaaggtaagtgctgccactatttaccatgttcatgtaacctaaccaaactgacggtctcagaactcacggggccctgaggctacctactaacattctgaattggctcttgtaaatgctttaagtttagactggcttttagtgactttttcctaccggactaagagtcatattactgttaagagcaggacttgccatgttagaatggaaggactatgagttcatcttgggctttaggcaagtagaagttgaaaagattaaaactgggtttgacagtacaggggaacgccagggccaagaagtgggagtgggtgggtaggggagcagggtgcagggagggtatagggaactttcaggatagcatttgaaatgtaaataaagaaaatatctgcccatggcaaaaaaaaaaaaaagaaaactgcgtttgattcattttcaaataattagtttaatatttttggaaaatatgctaattacctagatgcaaaatagctttaatttttttagtattttgtcatcctgacctctggtctccaaacaagttttggaatctgatt

SEQ ID NO: 36311 - DNA, 2272 bp, Mus musculus
tctgtttaaaagggtatcttctaagtgcattactcccttaaatttaacagctgtgaagtaaatcttttttcacaaaccaccctaaaagtctaaaaataaatgtagcaagacccaaagtcaacatgctgtgaggctggcatatggaagagtcagttcgagtgtctggagggaggatggtgggtatttacagtagtttccacgtttcacgtgcattgcactccaaagaatagggtgggggtcaacgattttccaactgttctttagatgtggcttttgttgggatcggaaaacatcaagagaagtgggggttgtcctctaagctatgcacatactcgcagcctagaaaggatttgaacagagagtaggtgcagaagcgtctaaagaaggcatgtatttgatagggaaaggaccagagtaggctaatcctggggtgatagttgcaaaaggctttctagactttggggccttggtataagatgtccttaattattgtgggggccagtaacacacaattcaacatgactttgatagtctccattccctggctttatgaattacctacactttcaggttgttttgctgtattttataaaaataggttctatcttactatggtgttgaaaatttgagacttgggaaagcagacagagagctctggaatgcaaaggatcaaaaacagccagctctcttctgtgactcacaaaaaacaatggatttcatggctgatcttggtgcttaaaccaggaaggtccagtctaactctatctgttcctctgcaagacccaactcctgtgactaacctggatgtatactttgagccttatttaattcacagagaagttgacttaaatcagtgtttttatttcaattaatgaaaacagtcctctttcaaccccaggttacttaacattttgctgatctcccccaagagatcattggtggagaccaattaatgaaggagtgaattcagtttcttgagactgtggtattctacagagccacacctaaccactttttccagtgaagaatctacacaataatacccaaatatggatggccaagaagaatctgtatctacagtgtgctttgtgtgtttttgacactgctgtattttgtgttgccaagtgacttgtaactggttccaacgtgacagttctttaaaagttctagtaattaagtcaacttaaatttttgtaaaacctggtgtcactataggtctcacaagtaccacttttattccagtctttaactgttcataatgggcatagcaagggttggagtgagagcctacttcctacctcttaaggcactttcctcattgttttgccatataaccttggactgcatgataagctgatgaaatatccatgacttttcccagagcaactagcaaggtatatgacattttggctagagattagtgggaaggaaaatttagaggtttaagtccggatgtatgaacctcaaaaaaaagtcttctaaacacatatcatttaagtacaatatatggaaatgtatctgagcagagagtcactataacagttctctctaagtagattagttcaatgtccaatgaaagtgaacatctttattcctatattactatagtactggatgaactgtatactgagtttttcaaacaagtatttaaagtagaacttttaagtacgagcaagggcatgaggataaagactttgggttgtgtttctgtaagtgtagtttaccatatagagctttgtttcttaattttaaaaaaggtttcaaagtattgccattcattagcatccttaatgattatgagcgatgagtgtgtaactcgaaatcatatacatgtattagtttatcttaactttttaccctaaataaaagggaaggtgtacacctaaaagatgtaattattttgcatttttggccatgggtgggaatggggtgggcatctacttgagcagtttttaaaaaagaaaaaaaaaatcagaaatatttttctactattatatatgatcttcctttatactagtttatccctagtaaggcatgccagaagcccaagcaaggtaccatatcaagggttcttacgtgctgtacctttcgttggtgggtaatcgaatcagatgcttggcactgtggtcatagttatgaagtgcttgtgaggatcagatttcactgaatactaatttgttttacttaagagtctaatctgggaagtttgcaaatcatactattaatgtgtaatctaagctctttccaatgtatccatgaataatcctggaac

SEQ ID NO: 36312 - DNA, 1106 bp, Mus musculus
tgccaacacaaaaggaactctggaatcttggcagggttttgttgttttttttttctaacttttcttaacagctcctttacttgtttcttaccgcgtctgggttcgggcttttgtggcgttcctgtgtgtgaacttgggtctctctgtctagatgcaattcttgggctttgcttggtggttttgctgttgtgtctttaattttgttattattccttagatgccttcattttctcatgacacagggaatgaaaccatacggggtgggagatggggctaaagaataagaaatatatgaaaaattgagggtgtcacttaggaaatttcatgaggaggctaacgtggtaacattaggcacctgaacatggtaagtttaacatgattaaccagattgcatcaatttttaaatttaattgatttttaaagatgctttctagctgggaggtgctagtgtacatttcgtagtgttttgcacattactgatatatcttttctttcttatcaaaaccactaggaaaaggaggcaaaaaccggcgtagaggcaaaaatgagaatgaatctgaaaagcgagagcttgtgttcaaggaggatgggcaaggtaagaggctgagaagctgggatcttgtcggagtttcctgtttgtttgcctgtgttggggatcgaacactttctggctaacagactagactcctggctggctgcctctgataatgtttgagtttatttgcactgacatttggctattatcttttcttaaaagattctggttaagaatttggcattttaggccaggcatagcaatatacacctttgtttttaggatttattttatgtatatgagtacactgccagtacactgccgccttcttcagacacaccggaagacggcaatggatccccttatagatggttgtgagctatcgtgtggttgctgggaattgaactcaggacctctggaagagcaggcagtgcttttaaccactgagccatctctctagtccagtaatacatacatctttaatcccaacactcagaggcagagagacaagcaggtggatctgttgacttccaggctaaccaagactatgtgacaataaatctctcatctc

SEQ ID NO: 36313 - DNA, 2399 bp, Mus musculus
gttaactgatacgctaagtccactttgttgattcgattcaatggtccttaagactgtttaagacaaaaagcctttcctactttgaccccttccagtaagtaaatgggtgttttgaataaaccatttgccttgtgctcagtataaagtatgactaagccctgcctttgcatagctgttgactggacagtctttgtgtatattccagttgcccagagattttgatacacatggaggcagaaatctgtgttttgtttttgttctattttgagacagagtctaactttgtatctgaggctagcttggagttcactgtagtgctggtggacctcagacttgctgggatcctcctgagtgctaagggcatatgtatgtaccaccatacctggcagaaatctatttaaaggcaaaaatgataggtctgcgtttcatatttaagtatgtggctatttttatactggttttgataccatgtacattttttttcatgattttattttgcagtcatcggcttactggaggaggaaaggcatttccaaaatggttttttgggtttggaggtttgtttgtgggcggggagtgttgagacagggttactttgtgtggccctagcgataatgaaactcactctgtacaccaggctggcctcaagctcaaagacgttttcctgcctctgcctcccaagtgctgggattaaaggtgtgcgccgcagctaccaccgacaccagcacggcccgtctccaaaatagttttcgaaactggtttttcatgccggttttgaattaaggtcagtagttgcaaaaattgaacattaggtgatgctcaattgtcttaacatagaaatactattttaattgttgagatggttgcttgtctcaactagtgtgaataggaaatttcccaaacaaagaaaagattgttttaatcatgtgcgtagaatatttttacccaacagaaagatggtattggagtattgcttttttttttcaggagtcttactcacataagctacaattttgagtactttataaacacacaaaacataggcaagtgaaaatataaattttacagagcaaaagtataaattaatgctttttcgggctttccctaaacttgagaggaaatgaggggataacaaacttatgcctgacataatggcatggcctgtgaccctgcgcagaagggcagggcaggaggatcaggagttctgcatgttttcagaaactggtttttaatgccaattttgaagaaatgtctcaaaaacaacgttcataaaaagatgttttcttatttctgaatcaaagagctatagccgaaaaagtagtgtgtcgcagaggatcttgtcgtctggttttacattaggaacaagtttaccgtggggagggtccaggggaatcccattttctttctactgggaaattaggtttgctcttatttaggagttctaagactaggagctgagctagtcggaactcactagacatgctgaaatcatttgggtttcaaaccaagatccatcctgcagcatgcggaccttgtattttgctagcagccagaaagcttttcgttcatgaaaactgacacacaaaggaatgcgcctttcacgtggtttcacaaacaaggagatctgctctaattatttcctaactatgacttcatctcctcggtttgcacactctgcctcaaaagccgaggtaccataaaaacattgggaaagacacagtggtgcagtgtatatttcttcttctgtggagttcctccgtgtttatcttggcagactgcatctgagaacaaggctgccaatagcctcgcagcgtttgctgagcaattgtcttccttagtaattagacctctgtaccttaaaagtgtttcaccagctggatgtagcgtacccctgggatcccagctctgggggatttgtcattgaatagtagctagggctacataaggcactggctcaaaaacaacaatagaaaccatttttgctcaatttgcatatatatagattactctatgagcagtgctttgcttctgcttaggtgatacagctcgagtcttgattttctattttctgtaacaaacaagatttgaaatgattttagaaattagacaatgaccccacttcctatctcttctggtggttttctcttttcttcttcttcttccctaaagcagcattattgagtgcttttgcatcctggaagatctggagacattgatttaaaatagttgaatgcagttgtattaatacagtatacaaatgctacctggaagagttctttgatgtgtatttggtgtgggaatcatacagtgtcacaaatccagttttagttctaataaggaatggaaatagtctttaaggaaattatttggtttctttatttttggttcctatagtatag

SEQ ID NO: 36314 - DNA, 1199 bp, Mus musculus
tttcaaaatcaaatgctgtccttaaaagttatatacaaggctgaaaattttcaaattatactttaatttcctcaaatggggaataggttatgctttcaattagaaaggctatatttggtaccaggatcaaatttcttaaccagacttaagacaggcttgaaagagttaatgcttattgagcattattcatgagcaagtggagctggcatagcaacagtttctccccagggaggagaggggaggagacagacaggacaggacacagtgttcacagtctgtggttggagagccagcactagcctagctgtattgtttcctctccaccccagcacaaaggtactggtgtggtgaagagagcacatgtgcctgggtttgggatgctgagcacagaaagccccttttggtgcctcttctggagcactaagacagcagcagtgcagtacagctgaatggtccatactgtttctgctaaagttctacaccttttgtaaattgggcaggagcgcctggaagcaatgatgcgccggtccctggagcgtacacaacagctagagctgaagaagaagtgctcatgggcaggatcaccagggcctggcggacgtgatggtgagtctaatactgtctctgcattgcagggccctgtagggaatctcgggagtgactgatgtctgcaggattggaagatcctgtgcacagcttttaagatgcttaaactgccatgcttcctgtatgtatatgcatttctcatagaggagagctgtcattctttttgctatcaggtactcaaagcatgaatactgggctttagggaagagtgaaagaaaagcagagaaaataaatatagagcctggtagctgaactgagcacacaggtccaaaaacagtctcattttaggagagggaaatagcagaaggcacagtcacagctctagatatgcctggaaaagcagcagttactctctaagaagggctgggcggtttccttttttcccctgtttgttgctctgattttattttaaaggaacttaacttactttactatctaattcataatcatctttaaatcttcaaagacctaacttatggattattactactatcaggatgactttcccctcttttcaatgtcatagtttgtttcaataatctcagtattctattatacaggagttgtatgctacctctttctgagagcagatt

SEQ ID NO: 36315 - DNA, 1655 bp, Mus musculus
cctcccttgtccttcataaatctgccctgcttcttcaagggagaactgatcttcacttaacccaaacaaaacatgtgccacttttggagaagtcctatatgaggaaaacttgaaccactaaaataatgattctgtaaaaactgtacactatttctgttgagaaatattgcattaaccaatgaagaatgcgaaatacttggtgtctgcttcaatctcccatgctgttgcttttgaattgacacaggtggtgtttggatcaccctcgaagctgtcggtgttgcatctgagctgctggccgcctgaagaagcttcttttgcccttaactgctgggctccaaattactagattcaaaatgtaactgtattcctaggtagtttggcaaaccctggcctctcttggtagaaaccttgcgagttttgctttgtggggctttagcagagtttcattgtatggttctccttatgagcttcagctgctgctaaagcccttccttgaccttctctactatcatagcctgtgtgatgctgtctgggaaccctactctaggacactcgaattcccagagatggagcacagagacatttagatgtctctttctataaaaatcttctatttacccacactctagttaaacgtgtactactcaacctggctgcttctctccctgtcttttgtgtgtgtgtatggggtgagggaaatctagctactttctccccgtctcaggattctgttattttattattaagctccatcatctgcagagcattactctcctttactgtttaggggttgaagaaaggtttggttgaatgaataagtaaatagtggcaattatttcttttcccttatgggagctgaatctagcaaggaccctttcatgtcacccctttaaaatcgccaaattgttgctccaaaccattgaatggcttttcagctgaatgaatcaagtaacatacaggtggctattttcatggttttgctgttgtttttctattagatcttggaattttcttttgtttgctcctgcatttgactaactgtaataaaaaaaaagagtcagtgctttgaaagggggccccaagttggtcccagtatgtcactttaatagactttaaacattcaaaagtctgaacaaggaaaatgacactagaatgtataactccatgtatgccatatgctatatttaaatgtttcatttcttgtggtgaaatgtagctttattattaaaatgaccttttctttggaactttttgttttgacttgtaccttaaagcttttgaaaagatccttaattctgagaattacaaacagaagatagaaagaagtcttaaagctggtacagttaaagaatgtattagtctcagaagctgtgtatgtttatgtgatagaatctaaataaaatacagacatctaagaatgctgtgccattgaccttgatgaatatctaaggagataaatcttttatgataagcacacagatgataacatggtctgacatacaaaagtgtctgtttcactgagttccattgcacctctcaacacagttgtgatcacctgatgcctcatttgcatgatgtgtacattcggtttaatgttaatacatcttcattgaagagtctaatagcttgctgttggtttgtttttataacctcag

SEQ ID NO: 36316 - DNA, 1194 bp, Mus musculus
ggcttctccggggacctcatcccttctccggttcacgctggggccagcgccttccctaagcggctgccgcccctcgaggctcaggctcccttggcgcgcccgcttggctctctgccctgagggggggtgggttctgaggctgtccccgccggtgctattcctgagccgccgccagctcgggcacctgcccgcccccccccccaacccccaggtctgcccgcccacggcggcgggcaggtggcggcgccaggctcctgccgcgtgggtccccggggaccagggagggggcggtgccgggaggctgaagcccgaggacgcggagccctccggagcggagcgatgctcccggctttgtccgccaaagatgctctggcctcgggagccgcatcctccgcggacaaggtcaaaggctagttagctagcgcagacctccctgggaggaattcagtcaactgggccaccggtcaggaccgccctagagaaacttagccctcgaaatatgcttttttttttttgtttgttttgtttttttttttttttttgagttacaccttgagtgactgcttctctggaacacattccaaacggccaggagaaaatagggccctcgaggcttccggtcaggctacctttttaacttttcttttcttttataagcctggaaagaaaagctaggcccttccccatggcaagcaagcactccaccgtagagctatgtaccttttgagatagagtctcactcaacacaggatgctgtttaactcattctattggtcaggctgggcagtcctcgaactttgtacccactctccatcctgagtagattataggcctgcgtggccaggcctggcatatttaaacttttctttttccctagatgtgaacaggtccaaaactttaaaaggcttgtttgttcatttatgttgaggctttctttttttcttccttttttttaaaaaaagggagtctttaaagaaaggatggtcttgaactcacagtgtagccaaggatagccttgagtttctgactcccggtctctggcccctaaatgccagggttgcaggtgcatgccagtcatgtttgttttattttcctcggttattgatagcagttcagcttcccagttactccgtgttctaaaaaaaataaaacaagttagtaagggtttttctaagtgaacaaagtttgaagtta

SEQ ID NO: 36317 - DNA, 1125 bp, Mus musculus
aatagaaccaaatgatctacgacatgacattgagagaaggagaaaagagcgattacagaatgaagatgagaatatttttcacatggctagtcctacagagaggtaatcagtaaatgaaaaacatcctgctatctgggagcttttggttttaggagcttttacattttttgtgcttaatttttgcccgattgttcgatctgttttgtgtgtttttaaaatgtttcagttattcagtggtcattacaggaagcttgttctacacattaaaaatggagtgggtgaatatttgaggtcttttaattctagaagtgaagaatatccaactgtttgactattagcaggagctatgaccagcaacccttatgggctatttgaatccagcagtttgaaacgaataggtttagacccttagattctgacttaggagtacaacattttttgatgtcagtacagttctctttgggaattcttgggtctatgaagtagacagttgcagtagaacaagtggaaggtatggtggcacacacctttaatcctagtactgtagagggagaggcaggtagatctgtgtagtgagaccctgtctcaaaaacaagacaagacaaaaaacagaaaagaaacagcggagggagacctcaatttggatctcattgactctgcccatttacaaactgtcaataaattttacgaatctttagaattttctccatagtatagtgataagaccatcttattatacaggggcagctatactcttaagtcactggcatcttagcagaagttataaagatatcattgtcatatcattgttaaattcaacctcataactctttccaggggtctttagtcatctagattgaccctagtctacctctagttctaagaactagtaggacctatgacgattgtgtgaccccaaaggattatggggaataactgaatgagacagactgtctagtttgggcaagggttctttgtgtccctcagaaacaggactatgaataggaagggatagtgctaattgttcttctataacctttagtatcaactttttaaaacattttaagtatttgactagataattttaagtcaactccaaacttgattaaccttacccaaaataca

SEQ ID NO: 36318 - DNA, 1404 bp, Mus musculus
aagttgtggaatcaggaaagatcatggtatgtgctgggaactatatgtacgcagttaactatctaaggttcaatgtatgtgtttggggatattgggagaaaacaggtagtaaagccataaaataaagagctagggcaagaaggacacgggaaaccatcagcaatatggattttatcccgtacaaaatacctgggaagggctgaagcatagcagttggctcactatggaacagggcctacaaaagactagaagaggtcttaattgcattgtggggagatatgacaaggaaagaattgccaaggcctatagaaatgagccttccaggatgttcctcgccagcagacctaattgtcagagactcttgctgtcattgtcaggagctaggagcctgtcctttgcagtatcagagcccataactttgccagtgaggtgaccatgttttaccttccctcttataaatgagataggtcaggagtcactgatagatacttctgccaagtagaatctcaggaattgggcgggggcaggcagtgatgcttttacttgagggggaaaaacttccatgtatcagccaggaatcctgtcattgaacctcagattgagaccccctagtacaaggaatatcgctttctctactgatagtttccagcttagttaaataatatttgttgaaaatgtcagtcttaatgactatcctttatcattttcgtagtgacagagcattgaggttttactggtgtgcggtatgtttgaagactttgctttttaactgattaaagtaacaagattcttttttccttttgttaggaatcatcagtctcccagtttttcaaaggtgaagactattcgtgctgatggatttcaaaagcctccacattttataaaatcaaattttagaaaatttattcagaaaccttacatagtaagattggagtttcaagtttttcatttttgtatattctttataaatatatctatacttttcaaagtgcttgtaacttcattatgtgttataagagcattgaggcttaaagatttttatgacataatataactcatctcttgatttagttgaagttcaatttattatagtactgattttcttaagctgttttggtaacaacttaattaagatataatttatatactctaaagttaactcatttcaggtgtataatttggtgagttttagtaattctccaagatgtgttagagtcatcaccatagtccagttgttggacttgagacaggatttcactttgttgctcaggctaagcaggggaactcaccatatatcccaggctagcctcaaatttgcagctctcctgccttcaccttctatgtgctaagatgacaagcatgtggcaccatatctgagtaggatattgtcattacccagtaaac

SEQ ID NO: 36319 - DNA, 1149 bp, Mus musculus
agttcttatcatatagaactttagtttgcttggttagagttacatcaagatattttatattatttatagctattgcaatgggcgtttccccccaatttctctttcaacccatttatcatttgtataaaggagggctactaatttctttgagttagttttatatccagccactttgctgaagttgtttatcagctgtagaatttctctggtggaattttgggtatcatctacaaatagtgactttcttcctttccaatttgtatccccttgatctcatttgttgtcttactgctctgactagaacctcaggtactatattgaataggtagggagagaatgggctgccttgtccaagattttagtgggattgttgcaagtttctctctatttaatgtgatattggctaatggtttgctttatattattgcttttattgtgtttaggtatgtgccttgaatacttggtctctccaatacttagaacatgaaggagtgtaggagtttttcaaaggcttttttagcatctaaagagatgatcggggctggagagatggctcagtggttaagagcactgactgctcttccagaggttctgagttcaattcccagcaaccacatgatggatcacaaccatctgtaatgggatgggatgccctcttctggtgtgtctgaaaacagcaacagtgtactcacatacattaaataaataaataaataaataaatatttttaaaaaaagaaacactctggtattaaacacacaaattaaaaaaaaaaaagatgatcgtgtgatttttttttttaacccccttagagtttgcttatatagtggattgtattgatggattttcatatattgaaccatccctgcatccctgggatgaatcctatttgatcatggtgaatgattgttttgatgtgttcttggatttcacttgtgagaattgtatttttgaccatttttgcattgatattcataagagaaatcaatctgaagttttctttgttgagcctttggttttgttatcagggtgactgtggcttcatagaatgaggttggcagtgttccttctggttctgttttgtggagtacttttaggtgtattggtattagctctttttttttttttttttaaagatctgattgaatt

SEQ ID NO: 36320 - DNA, 1143 bp, Mus musculus
ttttgaggcaatattctactatatagttcagtttggctttgagttcatgaccatccaacctcaactactcaagtattaggatcatgacatgtacactgagtttctttcatatatttttcaaaaaggtaagcatattattctatataggtatattgacataaatattctaccatatgggtatattaattatttcagcttcccaagtccttttacttatatactcaataactaattttcatttagaagatacacgagtgggactggagagattgctcaaaggttaaaagcttgtgctgctcttacagagtacctgggtttatgttcagcatccacatggtgtctaacaactgcccataactagttctagaggatccagctccctctttagagagagacagacagacagagacagagagagaaacacatagagagagacaaagagagtgtgtgtctatctaaatatataaaccaggctagcatggaactcactatatagatgatactggactgaaactagagatcgatttgcttgcctctgcttgccaagtgttaggattaaaggaatgtgccatcatgacctggcaaaaaccaattttttgtttgccttaagacaagtactgcatggtactggctggtctatgtatgtcaggcttgccttaaattcacacagatccatgtggctgtgcctccagagtactaggactaaaggccaacatttcccattctttgttcactttcttgacaccatcacttataattcagagtgttccatgctgtgggtgcctcccccaggtaaaacaaaataatagattcaaggagcctgtacagatggctcagtaagagtataagtgcatacctgaatttcagtcccacagtctccataaatccagaaaaagcagtgtgcatctgcaatcctagcatccaccaagataggggagatatgagaatccctggaagcttggcagggtggcttgtgaccagtactgaacaataagatcctgtctccaatggtagtgtgttctagtgacctaaggtgctgtgtaattaaaggaagctcatgactttgaaggagcatggtaaaaataaaagggagagcttggaaggggagatgggagaaaatgagaaaagagaaaaagagaaggg

SEQ ID NO: 36321 - DNA, 1296 bp, Mus musculus
aactgactcttccatggaaatccatatttctcttgttttctcttgataggaatacccagtattgccaaggacaaacaacctggaattgttgcaagtggagccaaccctatatgaagacttaactgagcatctcatttttgtcaggaattggaattgacactaatactgtaactttcttgataaaatatctttatttttcagtagtggaatgctgcaacttttttacagtattcaatttcagaagttgtatttaactacaagctcttttgcaaaaactctcagcagaagcatttgaggggcactctttgttgatgcatctttctctcagcatggtttcactgagagaatttaattaaattacatgtaaacatttatatgttgaaagctttctgttataagaacaggtgtcagaattatttagtgtctgtacatgaaagaacttttaaacagtggccttacagtatcaaattttatactggcttttctttttctgatgacattttggcttctaacttgaagttttctgaagtttctgaagatcaaggcctgtatgtgtcatccattttgtaatacaatataagaagcttaaagaagaggtgcatcttctccatcgggtcgtgtgtatcttgggttttcccatgaccatttgctcttttctagtttcaaatgctattgtggaaaatatgtaaggattttataatctctattccatcttcttttccctcagggcaagcttatgcatattatatttttaaaggcttttaaaatctgacagacaaaactgcatatttgaacattgtactttactactacggtattagacattttgcagacacatcttacagacagcatatctttggttcagttgatagatatttcatatctactatgtgtaagataggatccatgggatcgtaaatacagtctataggtccaaaaacttctttgttttctttcttctgcttaaaagtacatatacattcccagtcaaatttttgtgacatgtttatttgtaagaaaataaaatattgttctttctgcttgaagctgttacctggcagttggtgagagcattctttgtatttttcatgaaactgataacctatcgatactgaatactggtgaacacatagtgatgtatattttctccatttgttctttttgaaatgttttctttcacacaagagccactcttccttacctgggtcagtgaggagggaagtccgagccttgattcagtgctcattgggggataggtagacggtgcacacgggtgactttgtatcatgtgctacc

SEQ ID NO: 36322 - DNA, 1139 bp, Mus musculus
aagtgattttctcatacactgacggagcatttacaataatactgattaagaagacacacactcagtagatcttgcttattaactgttagttcagataattcaaacagttaaaaacattaaccaaatgaccaactctgggagtagttcacaatcactatgaagcatcattaatgaaacttatcctgagctgtccagtgtgtcctccctaatagcctttcccagtatagagttgtaaacatactagatgttctctcttggttagatgttagtgaactcaaagtagttagtgcttatgacagtttgcatttgtaggctgctttgaagagccactgttttgccgttatctgcttttagctttggctcaggtttcattttcttggatactcaacttttcatccaattcatccttgtgattctctccgctcagcggcaagcatgtcttgagtgcctgcaagtgtgcatgcaccaaagtgcatccctgggtgttgttcctcagccactgctctctctctcttctctctctcttctctctctctctctctctctctctctctctctctctctctccccccccccccagacaagcatcgcactggccttgaatttgtcaggtaggctagctgggctggccaacaagtcctaggggcctacttctctagcagcaagcacatagcaccatgctggctttttaacgtgagtgttgggaatctaacgctggtctttttgcttgcaaggcgatgctttattgcttcggttttcggtgtcttctccttctagggacttccagtagcagaattccacagctgtagtagaattcctacaatgggtatgtgctgggggcaggggaggtagtaatgaaacttcttttgaaagaggattttaaatgtgcttgaggaaggcaaggaagggtcagtgtggtttcctctcatcttgctgtctactttctctctgaccagacactggttcttttgttaacacagactgctctgtgactcagcccttgctctagctctgattgctcctactgagcacgttttcctgttgaaatgctctcaacttctctccttttgacctggatatggcctcttgcagctgattcggcttagctatcctgaagcatacatgtccatctgtaaagc

SEQ ID NO: 36323 - DNA, 1144 bp, Mus musculus
cctaaaacaaacaaacaaaccccacttcattcacagccagcccttttctttcatattcaaggctctttcagttgctttgaagccctctctgttctttgtgctattcctccagaggggccttggaggaaacctatttgcagccccaaaggaagctctaagttctgcatggttttgttactctgagcagcacaaccagatgctccatccaacagctttggtgctttgtcacttagtctacactgtcatttcatctttctttgagtttgtagattttcttttagactcatactaaatgttcttaggtagaccccgtataaagaataatctccaaccccttccctcagtcatactttctgggaaacatctagttcccgatgatccccatcagctgctatctacctctgcagagttacattgatataagttctaagaagctgtgggcatccagtaaggaagtgctaattgcatacgagacaggctgattcagtacactgtagcatacacattgatatccttttgtttttgtttaggaacagggtcttgagccgtgcgatcctccctcctcatcttcttgtgtgccaagaaacatgacagtgttttgttttgtttttaggcacagatgggggaatcctactgttcatttttttattataatatttttgttcgattaaattagaatcttaaaagtctttttgtattgatccacttagatttatacactttccttaatactctatgtagtatacccatgatttaactaatcggtcccctaataggaggacatttagaatgtttctgatttttcactgttttgaataatttagcaataaacattttgcacacatccatttatatctgtagcagttattttttgtcaacttgctataaattatagtcacttgggaggaaggaacctcaattgaagaactgaggtgatcagattggtctgtgggcgtgtctgtggaacatttctttgattaatgatagatgtaggaggacccagcccacctagagggatgctacttttgggtcctggggtataaagaaggcaggctgagtgaaccagtacatgttgctccttcatggcttctacttcagttcctgcctccaggttcctgtctttactttacttgatgatggactc

SEQ ID NO: 36324 - DNA, 1177 bp, Mus musculus
gtgatgggaggtgatggtggtgattggaggtggtggtggtgatgggaggtgatggtggtgatgggaggtggtggtggtgatgggaggtgatggtggtaatggtggaggtggtggtgatgggaagtggtggtgatgatgggaggtggtggtgatgggaggtggtgatgataggaggtgatggtggtgataggaggtgatggtggtgatggtggaggtggtgataatgggaggtgatggtggtaatggtagaggtggtggtgatgggaggtaggtgatgtggtttcttcctactatttctttatttcaccctcaatggttctttccaaacacgagaagaatatgcaagccatttatcacatagaatgaatccatacggcaaaataagaacatgttaaaggggaaatgacacaatatttagactccaaaattatatctccagcattagtattcccagaaacaatgagtagataaacacacgaatggatagctaatccagggggctcaccatgtttgcatactccaatccagtcctgtaccgtgcagctggccccctcattcttctgtcctgtgtttctgctcacaaatgctgagctttagttaattaaaatgtgcaccagcaaccttctccctcccccaccctgttggcttagaaatactgctctatggaaaatggcagcaacaaaggcaactattgttctatggtttgaatctgaaagttgttagcaatctataacaacctttctgtattttaccagtttgcttttaacagtttcttcccattctggcacttcctcacttaaatggcttcaacatcttatggtattgagcaattatttagtatattgttcctatggactaggtagccacaggaagctaatatacagttggccactaagaaaagaaatttggtggcattcttccaccttaaaggcattgtatgatcaggagatacagactaaattggttaaaaaaaaagctacctaccctacacatctagaaccttgaagatatagtttaatgacagaacttagtactcaaaatatcatttgaaccctgccctttagtgttataattaatgtcctgacaccaaaggaagagtatatgccctgaaattaagtagactcaaatagcgtctccattttagaaccatgagtgtgggcagagcctagggagaaag

SEQ ID NO: 36325 - DNA, 1152 bp, Mus musculus
tattgggaagaaaagggagcctggagaaaatgaacaattactgggatgtaggtcagttcttcaccgtcagcatgctggcaagtgatattgggaaagctgtccaggcagcagagaggttgttcaaactgaaacccccagtctggtaagtcccatctgtgcctagtaatctcatgtctccaatcttatcctgttctgaaatatctcattcaaggagaaaatgtgaaatgcaaaagagcaacaactgcctgacttcttcattaaagcagttaagatagacataacagctctgagagttcattgcttttatgtgcagggtaaaagagacagatatatgctcacctggaatgtatatccttgtatgctctatccctgagactaaaacatcagtcctcttgactctttttagcttttgtcttcaagagcaaaatgctgtttgatattagtatttatatgtgtttgtgataaagcttatatagtaaagctgaaaaacaacaccaagaaaacaatgttcctgagcaggaggcctgcagtggtctgctggccatggtgggatttgtggtgatataacgtattctgttagcatcctcctcagttgctatactgcctggctactccacagtgtatccctattcctggagaaccacacttggaaaactattgttctttagttttaatttaaaaatgtatacctggtatgctactcatagaaaaagcatgggcaatatcagacttccccataaatacatgaagcttcattagaattgtggttacctcattgattactatagtctcataaaaatgcttactagacaattatataatgagttaatgataaagagatgttatcctgggtattgacagtgcttatcttaaagagatgaccttataaaagttttaattttgtgttctctcttatcgttgttatctgagttttctaaaatacagatctatttccggttgaaaattccttatctgaactacttggaacaactctaaagcttttgagatttgggagtttggattttttaaaatatttgtatagacttcactatacaaatagagcttcagtagattcaacatctgaattaagaaacgccattgtctatctcttgctacttaattttgttttgtgaagtttcatttttttaatta

SEQ ID NO: 36326 - DNA, 2427 bp, Mus musculus
gattcttggagcatgctggccgaccctcagtgatagatagtactgactcagaataaggaggtggagagcaatggaagatgatgcctgatatcagctctggcataggcaattgagagttacaaactcacagtcttaagtgactaatcacattcatacaaaaactttgcttctccctttttcctaaaaatatgctttccatttttaattcatatgctgttgaagagtcacataatattactaccaacaacaggttctcaaacattctagttggttccaaaactgccctggattgaaaacaatctcttgtattgtaatctgccgtttaggagattgatgtggaagtgaggaaagaaatcgaggatgctgcccagtttgccacggctgatcctgagcccccgttggaggaactaggctatcacatctacagcagtgatcctccctttgaagtgcgtggtgccaaccagtggatcaagtttaagtcagtcagttaatgggtgactgttaggtgggtggatgggtgttcccatccagcgtaaggaactctgtgctctcaacttggacaggaaatacccagacaacaaaaggcttgaaaacatgtaaattaagggagagtaaaattgcatgcagtttgtacattgctgtatttggtgtattcattcatgtgaataagagtgtattggatttgtataggatttgagatgggtattgcagagtttataaccatccatcatatcccgggttaggtactaaaaaggaagaaatctgccatttggtggtgtggtcctagctgtgaatgcctgctggggaaatgcaaagcagaggtagaagtgtagcagccaccaggaattgtggaggcactgaccatcatgtctctgatcaaaggctagacaaaatcatgtgtttcaaaataagggaacttcagtcacctcaaaggtaaaatagtttaattttttccatttagacatttaacatacatgaaactgtactcccattgcaaggcacactttttaacctttcacatttaagtaattacactagtttataaaatacgtatgctttatctttccagcgatatgctgactttttaaatattaggtcagggctgacattacttacaatcttgtttataaacaaggatgctctacaatcacacgtgcttgaattaaatggacaagggtctttctgtggaaactcggagtttgtgagtacaccaacagaagctttaatcatgagcaggtgtaggggactttttgcccattctccccaggcttggctcactgtgaagactcctgcatttgtcttctgtgctgggagactgcatgccagagcctacagaggacaccacccctgcaaaacaataatttgcagaagaaaagcaaacttgaagccagccatctactctttaaatataatctctaacttaaaagcaaaagtatgtcgcctttttctgaacatggtaccataggaatgctggtggctctgtgtagaggtgtggatctttaaacaagagtgtaaagaaaggtctatcacttcatgccttgccaccctgaacctgagaaaatgagctctgtttgctgtgacataggaaagataggggagagctactagcatttttaagtattcacatgaaaacaaccctaagctgtcggggaggctctcttaccgtagtcggaggcaccttaggtcttccttagtgatatcattgagaatatcagaaagtgtatagtcctcttcaacaatctgaaagattcaacgtatggataagcagcttttcaacaatatcataggaatactttgatttagaaatttaccttttctattgtattggcatccactccttgtagttgcaaccagtctataagctctctgtcggttcccagtccatcagggggtggagggttctctgtaccacctataatgattccaattttgttttattgtatagtaatgtataaccataaaatgctttaaaagtaacaacgtggatgtaatgatgtatcgcaacagaaatgtcatgtgctgtgaaaaggaaacgaattaaacttgtttgattcagctacttttacagttcttgagttccctttccagagaacagttgtctccacctaagatgcttttagtgagtctggacttgagatactcagtctcacttaaatgcctgttctcatctcgggctggatcgtcctcactccactggaacaagaagcttgtgttaagactgtagcggagctcccagttcttcatcccaagagctacctctgtgcctgaggggtacatgtgagagtcagtctaatgtcggtaacctttttgattcaaagtcgtggaatgactatcaaagtcaaggtacatttttgttaccctgccctttcttaatactctgagctctacccattatgatcactgttcatgtagtatatggtaacctca

SEQ ID NO: 36327 - DNA, 1171 bp, Mus musculus
tacactttctgatattctcaatgatatcactaaggaagacctaaggtgcctccgactacggtaagagagcctccccgacagcttagggttgttttcatgtgaatacttaaaaatgctagtagctctcccctatctttcctatgtcacagcaaacagagctcattttctcaggttcagggtggcaaggcatgaagtgatagacctttctttacactcttgtttaaagatccacacctctacacagagccaccagcattcctatggtaccatgttcagaaaaaggcgacatacttttgcttttaagttagagattatatttaaagagtagatggctggcttcaagtttgcttttcttctgcaaattattgttttgcaggggtggtgtcctctgtaggctctggcatgcagtctcccagcacagaagacaaatgcaggagtcttcacagtgagccaagcctggggagaatgggcaaaaagtcccctacacctgctcatgattaaagcttctgttggtgtactcacaaactccgagtttccacagaaagacccttgtccatttaattcaagcacgtgtgattgtagagcatccttgtttataaacaagattgtaagtaatgtcagccctgacctaatatttaaaaagtcagcatatcgctggaaagataaagcatacgtattttataaactagtgtaattacttaaatgtgaaaggttaaaaagtgtgccttgcaatgggagtacagtttcatgtatgttaaatgtctaaatggaaaaaattaaactattttacctttgaggtgactgaagttcccttattttgaaacacatgattttgtctagcctttgatcagagacatgatggtcagtgcctccacaattcctggtggctgctacacttctacctctgctttgcatttccccagcaggcattcacagctaggaccacaccaccaaatggcagatttcttcctttttagtacctaacccgggatatgatggatggttataaactctgcaatacccatctcaaatcctatacaaatccaatacactcttattcacatgaatgaatacaccaaatacagcaatgtacaaactgcatgcaattttactctcccttaatttacatgttttcaagccttttgttgtctgggtatttcctgtccaagtt

SEQ ID NO: 36328 - DNA, 1286 bp, Mus musculus
ttattttacattattttaacccaaggtctcatagagcctgagttagctccaaactatctagcaaagggataaccttgaacgcttgatcctgtagtaaactttcaattgatgagatcataggtgtatgctatcacacatcctccctcccctccctccctcccctccctctcccttcccccttctcatttttcttaactccctatctcacttcccccttcctcccttccttctttccttccctccttcctttttggttttacaagacagggtcctctctgtgtagccttggctgtcctggaactcactctgtagaccacgcctcaaactcctatagatcgactgcctctgccttccagggtgctgggattaaaggcgtgtgccaccacagcctgcttatgccttcttgaagcacttctgaggtctgcatgtctttgctgttcaagttgtctgttagtggagctggatcttagaatgagccagcagtatctgtggggtggtaactggaggggggccatcttcctccacttcagaaatgtgaccttcatcggctagaagagggccccccagtcaccacagtgctcaccagagaggatgggctcaagtactacaggatgatgcagactgtgcgccggatggagctaaaggcggatcagctgtataagcagaaaatcattcgtggtttctgtcacttgtgtgatggtcaggtaagtgataggtttgttatacggccacattattgggatttttaaataggttgcttccttcttcccttctttccttccttccctctcccccttatcacttccttttacttctcctccatcctgtccttataactttaacatttaaaaaccaccatttatttacctatcttgtgtgtgtgtgtgtgttggggggacatttgtgtcaccctgtgtgtaagtgtgtatgtgtggtggcggcatcagaggacagcttgcagtggggtttgactcttcccttctaccatctgggttctagggattgagctcaaaatgtcaggcttgatagcaaactctttgctttcactgacttctgcctgccctcccacccactttttttttttttttttttgaggctaggcctcgatgcccaagctgagataggtaagagccaccacacttagctttaaatatagtttcttttttttttttttttggttttttgagacagggtttctctgtgtagtcctggctgtcctggaactcactttgtagaccaggctggcctcgaactcagaaatccacctgcctctgcctcccaagtgc

SEQ ID NO: 36329 - DNA, 1156 bp, Mus musculus
tgcagacatttggttgtgatgggctgctcccagcatctagtgggtagaggccagggatgttgctaggcaacctccagagtgttccggcccattactagtaccaaggttaaaaagtactgcctgagaccattccaggccaaccactctgcagaatttgccttctggccttggcctttccaggctccataactgcaagagtgaattcctcaacattgtattctctttaagaatcctctaccactgttctcaaatccttactatcctattgtttgtttccattgtcttggacctgctaaaaggtgcatactttgggaggaaaccagagttactttatatatgtttgagaacttaaattctaggttagcatccttagaagatctttcttagccgtgaggcttatatttagaagcaagcagcagcctggcagattggcatgatttttaccaactgctcaaaggcatcatagctttcagctgtgtctacggaaagaaaatgtctttgttttttttattcaagtcgtttaatagctctttaaaaatattagcatatggcagactgattagaagcaaaactctttcttggtggttgtgatgtggctattctagaagtattgtgctgtatgctttggttaaatctgttttaaaacatgctttaagactcaccatatgcagttgtatactttaattctaagtaaacctatcctggtcagtctctagtcatgctgtgtattataaaagtatgttgtggttgtagagttagccagtttagcatgttcctaatcagaaaattagtggactccactaggaaatgctatcccattttcccttcccagtacctcttagttgatatcatagtatcctcacttaaactagtctttagagtaaataaggaaaaaaagccatttattttcttctagccatgtattgagagtaactcatatgtgtataattttttcaaaggccagaggattacttctccagcgtgtagaaggctgtgtccattctgctcacctaggtttcagtggtcacagaacttttggcaaggatgctacgtagctcattggaagtcactgctggggctcagctgggattcagcaaaactgcatatcgcttgtgctcagaacctgtgttctggatgacattgctttttcatttgg

SEQ ID NO: 36330 - DNA, 1142 bp, Mus musculus
ggtaacttttcagtatttactacttattccagaattccgagagtgtcagtccccaaataaagtcagctatcactgaaatctgctgcgtaactgttaacccttccctgagattttgagaatcatagcactgatgataatgaagattataaaggtcttagattctttgaagcttaaattgtgtgcatattgcatatttatataaatactattaatgatgtgtattgattatatatagaggtcattttaaggtgctttttatttaattttaataagtataataggcactaaaatgaaactcaactgggtactatcatggaaacaatttgattcatttgcatgctcttgcgttcttttcctatcttgtttctgttaccagttcagtactgtctgggtagctctgaattctggcttttcccaggcaaactcttcaattatccaagtgaggtagaccctcagcagtttttgcctggatataatgacactaaaaaggtgtatatttaactcttctttttcatactagatctgtacctttgtatcccctgcccccaccatgtcccctgcaaaccagaaactacattttgtttcctctggaaagacttctcactgtgctgtgtgcttaggaacttcgaggtcccattgccatgctgtggcattcgtgactcgtcgtcaccaaggggctggtttcccatgttgtcatctttgctaacactgggatctcagatgtttgccgaacatttatattcatgatggttctttaaagaagggctagaacaattgccttctacctagagcaaactaatcctaactgatgaagtcaacacttaacttttcctacattcccagatttgagccagaaaatagctacaatgttttcaactagtgtttctgagctagctcttttatcctcttcttagctcttgtcggttctgactttcccttgatcctcaataagctataagtgaatctacaatcccatgcattctcttcctgctcacagatgggggcagtaacattttctctcagatctaataatgagccctctcttagcttttaactgtcacttccccttctggttggtcattcagtggcctcaaaaagatgtcatccactgcaggaaggagttgactgagagtcacaaaacc

SEQ ID NO: 36331 - DNA, 1222 bp, Mus musculus
aaaagagagaaaagagaggatgaggataggagagacaggaggcaagaaaaggttttgactaggatcctggctgcagtaggagaaagagataacggaaaaagaggtagacagtcagggaacctgagagacaaaagacagcagggaccaaggagacccaggaaaggcgggcagcgcctggagaggaaccaatgcgcatattgcaaggaaatgggccactggaagagtgactgtccgaaaaaaaaacaagaggtaaaggtgctttctcttggagaagatgaagactagggggaacggggctcaacccccctccctgagcctatggtaaccttagaagtggaggggacccccgtggactttatagtcgacacggagacgaattttcagtactcaaaacacctctaggaaaagtgaagaaaaatgaaaaaaccttggtgatcggggccatgggacaaaaatcgtatccatggaccacatcccgagtagtagacatagggcgaaatcgagtaactcattcgtttctagtcaatccagagtgtcctatgcctttattggggagagacttactaaccaaattaaaagcacaaataactttcacctctcatcgaccggaggttttccagggaataaaagtgccccagactctagagctgtctttacaactaggggaggaatatcgactttaccaaaataaagtaaagccccctgagggattacaggactggttgattcgataccctcaggcttgggcagaaacgggaggagtggagatggcaaaactggtccccccccccgtggtgattcaaattaagtccggggccacccctataggggtctgacaatatcccatgagcagagaagctcaagagggtatacgcccccaaatcaacaaactgctccaacaagggattttggttccatgcaaatccccttggaacactcctctacttccagtaaaaaaaactagggaccagtgactaccgtccaatccaggaccttagagaggtcaacaagagagttcaggacatacaccccatggtgtcaaatccttataaacttctcagcaccttgccacctggttggacatggtacacaatcctggatcttaaagacactttttttctgtttgaggttacaccccaacatccagcccttgttaactttcgaatggcaagactccgagagtgggcaagccggacagctcacatggacgaggctgcctcag

SEQ ID NO: 36332 - DNA, 1143 bp, Mus musculus
gagtaacagccaactattccctagcatcttatgtacctggaggatttgacctagacgagtgtactgactggtgccatcagctcagtgtcaccttcactgaaccagggaaaagagctctgggatggacaaaagggtatacctggggtcttaggatttataaggaaagatatgatgagggattattgttcactatcagattaaaaatagagaccccctacaatcctttaggccccccaaccaagtccacacccctcacccatacaattactcagcctactccattgattgcggacccccttaatatggccgctatcacccaacctcccactcctcaggtacctctaactattacccccgagattccttcaagacagaggatgtttaacctagtgagaggagccttttatgcccttaacagaactgatccaagcgctactgaggactgctggctatgcctgtcctcgggtccgccttattatgaaggaatcgccttcaatggagatttcaacagaaccagcagccatacttcctgctcttggggtacaggacaaaacctgaccctgactgaagtatcctcgaggaatccaggtctctgtataggcaccccaccttccactcacaaacacctatgtggacaaattcagtccatgtccagaacggaagctaattactatcttgtaccttccccggttggatggtgggcttgcaatacaggacttactccctgtgtatcaactaaggtttttaattcatctcatgatttttgtgtcatgatctagctgttaccccgcgtatatcatcaccctgcatccagtttagaagaaagctatgctggccggcggtcaaaaagtgaaccaattactttaaccctggctgcattcatgggaataggtatggcagtaggagtggggatgggagtgtcagctttgatagaaggaagacagggaattcagtctttgagagatgctgtcaatgaagacctagcggcaatagagaagtccattgacgctttagaaaaatctttgacctccctgtctgaggtagttttgcagaacaggagaggtcttgatttgttgttcctaaaagaaggaggactgtgtgctgcccttaaaaaagagtgctgcttctatgcagatcatacag

SEQ ID NO: 36333 - DNA, 1125 bp, Mus musculus
ctttattattgggaaagcatagtggattaaacaaagtgttctcactttacgtgtgaataatttttgtttttcatttcataccgcaataaagctgagaaaaaacgcaagggcaaaacagtcaccacaccttggactgaggatcccagactttttgcagatcaaggagcagccccaggtgattgcattgtttgtttttttaaaaatctatattacttacagtatatattctgtacattgaatgagagtgcaatgttttcaggggaaactatctttctaagaaaacaaattcaagaagcagcaaaatgagaaattggcagaaattttcattttggttagtcaaatttgtctcataataagttgaccctattggagaattggattttatactaattatgatttaatttcaacttttctccctaccctttcttccttccaaaatctctcatggattccctctgttttatttccactttcatggctcttttttcataatttgttcttgcatttaagaatatctatatacacatgtattcatacatataacctgtacagtctctctctctctctctttctctttctctctctctctatatatatatatacacacacgtatatatagacaaatgtgtatatatatgtgtgtttatgtgtgtttgtgtgcgtgtgtgtgtgtgtgtgtgtgtgtgtgtgtgtgtgtttctgacttgatttgtagacctttccatgaatcagtgtgcttttccctgcttattcccacctctatctttcccagcttttctcaattggtatagtcctttgtgtagggttgaggcatcacatgcctttttctttgtccagcatgtacatggattgttatgatttttgttcagctcactttttggtggtagtgttggtgggattttatgtactgcacttgatattactaggagtctttgagcaaactccccaactctctgactctttccagtctttctgctacctcttgagcagtattccctgagccttaccttaggtatagtaatgttctgtagatatatccattctgattggaaatcacaactgttgccattgattggttgtttttcctgcaatcatctctgtcacttgcaaactaaaattttcttg

SEQ ID NO: 36334 - DNA, 1147 bp, Mus musculus
tagtagttttcatctcatccgtttttattttatagaatgtttttatagaaatattttatgaaagttgtagtacattaatagtatactcttattctttaaattccatctaatacgtttgtattagcatgattaaaactggctgttcattatttatgtcttcagttatttttattgtgtttacaagtgtacttcatgtggcaaagagaagaaacatttttatttggattaatctttatatctagaaccaaacagctaagtccaaggaggaaaataccagcacttctaaaaacaggagaaattttttcttcaaaagagaatttcaagatgcacttaagctctcgtcagctcaattattttagtctggttttatgatgttttgttcctgatctactagtagaaagggaagagccatctaaattattcttttttctgtcagtgcccttttttgttcatactacagggggaaagcaattttataagcttatataaagtgttcttactagtttttgatattttttaaactgtaggctagattaaaattgataattttgtgcaggagatgtttattttaccagagtgaattggagagaattggataaattttatacctattttacaactttctatatttttgctaaacttgaacattagacacccaattctgacatctttattttctaagatatttgtgtccagattttaaatttgtgttttattttgtgtttattactcatacagatactttagcatatttatatactattatatatatgtgagaagacacaagtgactttttgaattgaatatggcactttacactgccacagaggtaataaaggtatatatagatgtttaatccctgaaaaaatatatacatcatttttctatcatcagtacctctcagcgtattattcaggtgataagaaactgcccataaattggctcccacatagggaagctctttatcctatgcaatatttctaattatttttcttagttctgagccatcaactttgctacattttgaaaggtgcattaattctgacattgagggttttgtttttccaaataatagctttcaaagtaaaatggtgctgcatgttataactttatatgatggtgtagtgcatataagctatgagaatca

SEQ ID NO: 36335 - DNA, 1179 bp, Mus musculus
gataaactatgctcttgtactgctacaaagggccatcatcttcaggcacatgttttgatatagcagtgtgtcacctggaagctgagcctcaagtactgtgttattaatggcaggcacttgggaatgttttacttccaaatataaatgagagcacatttaaaactgcagctaacttcactttgactcccagtttgataggctttcataagtgagagagaaaacagcttgcttgccaggaatcacacatgctagcaccatcagacatatgtatcttattggaacagaaatgatgagggtgttgtaagaaaagctaagaaagtgcagttcctatgcaaattctaagccagaaactaggtaaaccaaaccaaatcaaacaactcctatgagccttcactggaggtcagtgagtcctgtagttaacttacattctcttctcctttgaagcagagaatgttttcctaggtagaatcatgatgtttccacataataggtcagccccctcaggccatttcttggggtctttatctcacaggaatagccagtcctatgactaatcctaagcatcctttatctgggaaacagtatcctgcctaggagtttccatgactgctctctgccctcaggtctagattgaggtccagtttctctgcattccaatccattcccattagcaggaagcaacaaacttctgtcaacgaaagagtttatcactgtgggcaaagggttaatacagccttttccccttctcatggaaatctgtccttgtgttaacttaccagctctgttgccctggaaacgtggtgaaggtggaatgtcaactgtgttaccaggcaatattgcttatagtaaaaatgacccaattgttaaattgcttctggtgctgctggattgtaaatgaatctaaatacctgtcagggagccatagctttgggcttccctgactgtggaatacatgaccccaggaaactgcagttgtttacaaaatataccatcctgtgggatctgggaattctaagccaagatagaccttctactttgttgttgttgttgttctcttctgagctgctacctggggatccagagatgaatccatggatggatgtggtctcctagaaagaccctcttagaggacacatgcctggagctgccctgctgatcagggtggtttctgactctttt

SEQ ID NO: 36336 - DNA, 1159 bp, Mus musculus
gagacagacagagagatagagaggagagacagagagatacagagatagaagcagagagagacagaaacacacagagattctgcttccaaaaacaaacaaaacatcactaagtgctataagtcagtggtagggcgcatgtttagcatgtgcaaagcactgggtttcatgccagtactgagggattaaaaacttagactaaaaatcaggccaggatgatatggtggaagcaagaagaaggtattacaacagtgtgtgtatgtggggtggcggggcaaagtacaagcttaacatgtgtatatgaaggggtagggagagaacaggatgggtggaagaagaaatggcagtgactgatgattcttgtaaggagttttgctttgaagggaaatagagaactggagcagaagctctgtgacagtgcagtatggaaggaaaatgtcttcaaaggtatcagcatgttgtgcatgcttggtttccaaggagaggaggaaatcagtgctgggaaagagatctgaacagttatgaagtctgagaagcagagatggggtaagattaaaaacaccatctgaagggaaagtgacagatccgggcagagaggcaggtgagctggtggactgacagaggtggaggcggagccgggtgtttccccttgccattaaaaaaaaaatgatctctattttctctatgaagtaagtggtgagatcatgagctgagagggtgttggcaacccgaggagaggaggtaaggtgttaataagctgtctcaggggaacgtggatgcagtaaggaagtgtagtgggattagctggctgtgtggagagcctgcggagatttatggtcctaaacttgaagcaagtccagcttttcagtcactaacacctgaggctttggaattacttcatgggactcaatgccaagctgtttcagccttagacatttcttgttgttggcctattggatattgctaattacatttagtaagtgagttttaaagtaaaatttgcattgatgcctgacattcctgagtttaaaaagaggtaggcagcttctaaattgttcatgttggtgaattttcacaaaatagataactcaaggaaaaactactcagatggagagacaaaagcattgttgtgctgtctctaagacactatttaccttgccag

SEQ ID NO: 36337 - DNA, 1243 bp, Mus musculus
atttcactaatgatattcattatttaggtgacttataatttgtagggtggaagcagtttaaagaaaccttttctgagcctgcaagatggctcaacaggctcacttgttttataaaccaccatatgatctaagattacatgcctggaactcatgtaaaagggagaggaaagaaccaactccccaaccatgcacaaaattttcttaacattttaacaacctagtaaaatttacccacactcatataataataaaacacatgcactatatcaattgacattgcactgtcagctgggatcttgatattgtgctacacacttgatgactgaaggaagtgactaaacagtgcatggcaaataatttagagtcactgaaacaccctttaattgatagtaaattctgtttttacctatttggttgttatctccaggctgaaaatatttacaatgatgaagagtcagatgtcacggcatcggaactggaggggcaaggatcttaaacccaaagtatgagttgtttttattgaatgtattgctacatgaatgcttgatttgtcaagcgccaaaaaggcattgtatagtaggaaatgtaagtgggacggcttctggcattctttaccctctgattctagcactttcaagtgagctgttgcgtactgtatcatattgtagctattaggggataaaaaggaatgttgcttaagaacggacatcattgttttaagacacacattgctgggtattgcctttgattcaactgtcattttctcaaacttttaaagtgcttgctcaagttcccaaatatgcgaggataacttttacactttttccttccaacacttcttgattggctttgcagaaataaagttttaaaataaagtttgttttgttcttttagaagatgtggaagggtgggtgggtgtgcatgctcccatctctcatagtatatatagatttgtatgagccacatgagcaaccaaagaataatacacagaagctgttaatttcatcatacatatttacttaatctctacagaattgagtagataaaatcagatttacggtagtgaaaaatctctacaaaatgtctttgaaaagcaaaacaagactgcctcttaacaattcatatcctcatgaaagacgtgggctgtaaaaataaagcagtgtgtttagcacaaactatatctgcatcattttttcacagttatttccatctacagtctgaaagaggtagatttttttttctg

SEQ ID NO: 36338 - DNA, 1775 bp, Mus musculus
aacttagtactcataaagtagtcctaatatattgatttgaggatagatgacataaaaaggtgattattccttgaaaagtgcttttttgcagtttccagcaaaaacataaaagctcccttcctcaccatacattctggctttgttgaagttttgtgttcatttgcattaagactcaacaagcagggctgtacatgtgtgtagctcagtggcaagcatttgcctatcataagaggctctgggttgacaagtttcatcagcaaagaacactagttattttgtttcctaatagagaatttaaattatagatcagataacataagataacatttccaaagtaaaaacactggaaccagcttgggaaaacttggcagattgtttacatagtcaaaaagacgcctagctttctagtctatttctccgttttttgatgctatcactttaaaacaataaaaaccagtattaatgtttgacactttgatatttatggctcagccatgcaaattactaggtctttggtaaagtaaatttattaaaggttctagtaaagcaccatattcagagactgacttgttcaattggctaaaaatttcatttatactccttagcacattttatttttatggtcaaatctaggttcaaataattgaaaaaatggccaaaagccagaaaacagtccctgtagatggttatttttctaaactaatcaaggggtcaaaagtaaaagaagtgaaaaaagtgaagtcagaaacaacaaaaaaaccctttcagtagcctcttatcaaatactggactttttccccatgaacgtgtcagaaatattgaaattactactaatgattacatttcacaagtctgctggatacacagctcttaacatttgattaagccatgtgtgtagcctgccacatttttgtggtacttgtcctgtgtggaatattgcatattttcaagggctttataaagcaatgcgattaacagtcctggcctgctgctttcggcttacatgcattttcagctagatctttagaggacagagattctgtatgaaatatgcatatgcaaaatctctcctcctgtgaatgaaaacagatgggacctcaaagaaggatgccctccctccctcccttaaagtgatcacctcagcagcccagtgttgtggctttgtagcacgccctgtactaccgtattctagaacactgtaatgctactgtgctggcccagaaaagatttctatgttgaattcacttactgcatatggtgcactaccatgcaatcttgatgtatatttttagtgtcagtagaccccaaaatgtagcgaaacttgggtatcaggccatttcatcctcagacttgtagaagtacattttctggtcttgagacctgtattttttagttatgtatgcaactgcctttattacacacctggttatcacaattcaactctcaggtgttgcagaaaaaaaaatctacctctttcagactgtagatggaaataactgtgaaaaaatgatgcagatatagtttgtgctaaacacactgctttatttttacagcccacgtctttcatgaggatatgaattgttaagaggcagtcttgttttgcttttcaaagacattttgtagagatttttcactaccgtaaatctgattttatctactcaattctgtagagattaagtaaatatgtatgatgaaattaacagcttctgtgtattattctttggttgctcatgtggctcatacaaatctatatatactatgagagatgggagcat

SEQ ID NO: 36339 - DNA, 2101 bp, Mus musculus
aggcaggccttgaacttgggatctccttctcagcctcctgagtagcctgggcacaacagcttctgtgagcattgtgcccatacacctcctagtaacagaaattcttttggatactcaggaggagaatatgcagcaggcacgagaggaggaagaacgacgtaaagaagcaacagcacatttccagataactctaaatgaaatccaagctcagttggaacaacatgacatccacaatgccaaactgcgacaggagaacattgaactgggagagaagttgaagaagcttattgagcagtatgcactaagggaagaggtaatatagcactagattgttttatactgcttctcactgctagtagcaacttgtgttcactactataggaaaagtattactgcaggatgttttagaacttctgtctatgtgtaacacaagcgggcttattagaatagggaaagaatcaaaccattgcatataaccaaccaggaagattgagaatctgtctgcacaaataggtaagataatttccaggagtcttaagtactagttgcatgtgatactagaaaatggcaattctcacaacacagactgttttcttatcttgactaataatggctaaatttagccccagaatgccctgcatctatagccatttcattatatctgtgtttcagggtttgctttggtttagttttatttattttgtcattcagattgggttttgcttatcaccatgagtggcttccacctaggtttttcgttaattgtgctcttggttaaatacagagccttggccatactctgaagcctttctgctactgagctagctatcttcaaccctatttttttatctttttcatgtcaaaatcaatcccaagaaccttgtgtatgctacgtatgttttatcatttaacttacatcccaggcctgtcttttgtgagtcttttttgtttctgttgtttttcgggggtaggggttgtcctagaacttgctctgtagaccaggctgacctcaaactcaagatctgcctgcctctgagtgctgagataaaaggtgtgtaccaccacccctggccttttgtgagttttgtttttgtttgtcctttatctgtggcccaggctgacttgaaactcactgtattcctggcttgcctggaacttgaggcaggtgtagtctttgcttcttgagtggtaagagttcaggtgttttgttttgttttgtttcttttttccagacagtgtctgaaaaaagacactgccttgaacagtttttaagtttttcagtctattttaaattatatgtatatatgtttgtctttgtctgggtatgaatttacacatgagtgcagtggctacagtggcctgaaaacggtattagatcccttgcaactgaaattacaggtgactgagagatgcccaaggtgggtgctggggaccaagctcagaacattatttgtatttaattgctaagtcatgttcatagctctgtcttgaactcagtgaaacactgtaaattatcttctgtgtatggatcttctgtacgcatgtgtctgcacatgtgcctggtgcccaaggaggctagaagggtgtcagatcccctgaaactggagtcaacacatgcttgcaagccaccgtgtgtgctggaattcaacccagattctctggaagaacagccagtgatcttaaccactaaaccatctttcaagccccatttgtagatactgagtgtataaatcaaagttcttttggaccatatcatttgaccataaatttaatcactgctagaatgtatttgcttttcttctaaaattctttgtgtgtgggtgctccaagaggtcagaagaggatattgggagtccctggtgctggaattacatgcagtgtgagctgcccaatgttgggtcctctgcaagagcaacaagaagagcagcaagagctcttaaccattcctatttttctgttaatagcaacatcctgaattaagaaccaaataaagcctatctgttttactagtttatgtctcatctccaaaatacaagatttctttgtcctgttttattattgaagaacttattaaatagttttgtggtttggttgtcatata

SEQ ID NO: 36340 - DNA, 1429 bp, Mus musculus
ccttttcaacacaggtagatttagtatcaagaatatgtgaagggggctagacatggtttagtggttaagagtgcctagctacttgtccaaaagactcaggattagagtcccagcacccacatggcagctaacaacctactataattccagttccaggggatctgataccctctctggcctttggactaggaaagtaccataaatgtggtacacatgcaggcaagatgcccacacacataacatttttaaaagatacccatgaaagaacacctaggactggggatgtatatatatctcagtcagagcatttgtcttatatgtatatacaaggtcttagattcaattcctagcacaagagaataataataatatggaaaaataaaataatatctacaaatatgaaaggaacaaccaaccagtggaaaacagggcagaagataggaaagaggcattccatagaagtagaaaaccagagataacttgccctaacgacccataaagatagatagagagaggtattaacttcatgtagtggtcagaaaagaagatcacaatgagatgtcattttccatccctctctcttaaagactggctttcactctgtagccctggctgtcctggaattcagcaaggatcaccagtgtttgccactgcctcctgagtgctgggagtaaaggattggaccatcatgcctggtcctttgttgttgttgttttgtttgtttttgagacagtgtttctctatgtagccctggctttcctggaaagtttctctatgtagatcgtggctgtgtagatcaagcttgccatgtactcacggacttgcacttacttacctttgcctcctgagtactgggattaaaggcttacaccatcaccaccaggctggctcacaaggtagcactggtacaactacaaaatcttcttgaaattttatttatttaaatataggaatgctctgtctgcatatacacctacatgccagaagagggtatcagatactttatagatggtcatgagccactttgtagttgctgggaattgaactcaggacctctagaagagtagccagtgttcttaaccactgactcacctaacgaacccacatgcctggtccattttatatcttttatgtggcataaattaagaaatataatctttgcagggcgtggtggcgcacgcctttcatcccagcactcgggaggcagaggcaggcggatttctgagttcgaggccagcctggtctacagagtgagttccaggacagctggggctacacagagaaaccctgtcttgaaaagccaaaaaaaaaaaaaatcttcatatacttaaaaagagtagatttgcatggtctcttgtctttatttcccactttttttttttattttcagtgttggtttttttcgagataaggtttctctgtatttccc

SEQ ID NO: 36341 - DNA, 1203 bp, Mus musculus
gtttcagagacatcaatttttcctggtgtcccagcccaccagcgccacactatggcccagagtgagcactacaagcattgctggcctaatggatgggataggggagggaatgggacaggggctagaagaaggactccatagggtcatcaaggcacaggcactatacgcatggtgttggtgaagccagagccagggcgccacctggtcaacacaacgtccacatctttcttcttgtagaagcctcgggccttgccaacattcatggccaagttcagagccagcagctccatgccgtcatggctgacaacttcctggaacacagccagcaacactggcatcttttgtaccattggccctgcttcctggtctgtggagatgctgaaggagatgattaagtctggagtgaatgtgctcagccgatttttctttcatggaacccatgcgtaccatgcagagaccattaagaatgtctgtgcaacccacagaaagctttgtatctgattctattctctaccgcctggttgcggttgctctggacacaaagagacctgagatccgggactggactcatcaagggcagcggcactgcagaggtggagctgaagaagggagccactctgaagatgaccctggacaatgcctacatggagaagtgtgacgagaacattctgtggctggactgtaagaacatctgcagccgggcgtggtggcgcacgcctttagtcccagcacttgggaggcagaggcaggcagatttctgagttcgaggccagcctggtctacagagtgagttcctctatgtggacgatgggctcatttcgctgcaggtaaaggagaaaggtgctgatttcctggtgacagaggtggagaatggctgctccttgggcagcaagaagggaatgaacctgcctggagctgctgtgaaaagaggacatccttgccggcacatgcctttaatcccagcacttgggaggcagaggcagacgatttctgagttcaaggccagcctggtctacagagtaagttccaggacagccagggctacacagagaaaccctgtcggaaaaaaaaaaaaaccaaacaccaaaaaaaaaaaaaaaaaaaaaaagaggaacactcaatccaaggattgcctccattactctgggcatgttgataaagctttctcttaattgctaactgatgtaggaagacctagcccct

SEQ ID NO: 36342 - DNA, 1184 bp, Mus musculus
attgcctggagctggagagatggctcagtggttaagaacactgactgctcttccagaggtcctgagttcaattcccagcaaccacatggtggctcacaaccatctgtaatgggacccaatgccctcttctggtatgtctgaagacagctacagtgtactcacatacataaaataaataaaatctttagctgggcagtggtggcgcatgcctttaatatcagcactttggaggcagagccaggcagatctccgagttccaggccagcctggtctacagagtgagttccaagactgcttggactacacagagaaaccctgtcttgaaaaaaagaaaagaaaaaaaaaacatggaaggatggagtcaccaaccaaaaaagaaaaataaataaaatggtttttttcctttctatttaaaaaacaaacaaacacagccagctacagaaggcaagattttctgtgcttctgaagcctagaaaggctcaggagttctggaggcacactgcctctgtccctacacttccatagctatgtgatgtcagagtaggctgactctgctgcaatccagagggaagccaaggctgaggccagagctaagagttgaaacggctccagtggggctgggaattccagggatgacaatggttacaggatctcttgttttcaaaactttgtatgaagccagacgtggtggtgtacgcctttaatcccagcacttgggaggcagaggcaggtggatttctgacatgtgcaccatggccagcctagtctacaaagtgagtcccaggacagccagggctatatagagaaaccctgtctcaaaaaaaaaaaaaaaaaactttgtatgacttgacttctttttttttgtttgtttgtttggttggttttttgagacaggatttctctgtatagccctggctgtcctggaactcactttgtagttcaggctagcctggaactcagaaatctgcctgcctctgcctctgcctcccgagtactgggattaaaggcgtgtgccaccatgccctgcatgacttgatttctaaaactacgggtatcattttgtttgtttgtttgttttttaaagaaatcagttttttcccttttagacaggatttaactctttagcccaaattagcctaaactgcagttttatgtattttgcctgtgtgtatatctgtaccata

SEQ ID NO: 36343 - DNA, 1143 bp, Mus musculus
tgagaagcgagatgaaaactgggataaagaaattgagaagatgcttcaggagagttaataattgtctccgcaaaccagttcttaacattgtgtgacatgaaattctcatgatcgctgagtcagaaggcacaaaaaaagggtgtaactttatgcaatttgaaatgattctttttctagctaaaacttgcctcttaaatgaacagctattgtaataatcagaaacaacaggatattgtatgtaacatttcatacatataaaattagcattcttataagcagcagaactatctgtgccacagaaacacaggtaaatactagagtcttttttctagaaggttggcaacataatttattctttagttatgtttttctatatatgcctttttgttgataaatggttaaagtacttactatcagaaagtaatatcttactatcaaaatgaccaaattataccaaagaaatcaaaagaaagcactttcaaaatattttcttgccggatattttctaaaattctatctgaaagacaaaagctgagatatttctgttcacttgaatgacataaatatcacccagtttgacatgctgaaacactttctgtgcaggactagggagggatgtggtgaacacttgttgttcacagtgctccaggttccatttccactatctcagctaaaagtgcaagccagatttgtttaaataaagttgaacttctccctagagccttctcattttgctttgttaagtataccacaaattcaacgttgtgctttttgtaggaactgaggtcttcagtcctttttgtattaataactgtcaagaagcctgtttaccgtaaggtttgttctcctggtaatagtcactatgtataaatgtcttaaataattatcctttatagaatggtcttccttgatctagaacctactaattaatacttcttgtattctgctatgccatcaggcaactgttcatagaatgtgatgattttaaaagagcaaggtgatttaatgttagaaaactaactaccattcacctttcaagttttcacagcacttttatttcataagggaaataaaatcaagacatttctttataagagaattgtacgtatttatattcttgtactcgtaaaattcgtctccggg

SEQ ID NO: 36344 - DNA, 1252 bp, Mus musculus
tagcccttgtctccatactgatttccaagccattaaggctgtgtagtgagatctcgtcttaaaaaaaaaaatccctaatagacatgctcaaaggccaatttgatctagacagttcttagctgagattcaacctaggtgactgtagattgtaggtggtagaaagctgaaagttaaaactgaactaactctctctctctctctctctctctctctctcctccctccctccctccccctttccccaaaccatcccttgcttttttctaaaattgtgccttgctatacaactgagcctggtcttgaatttattatggtcttcttgcctcagctttctatgaagctggaattaggcctgcatcccaaagtatagctttttttcagaattttaaattaatttaaaaaaattatctttaatctgttttttttttttacagtccagttgttatccccatcctggtctgccctatgactgttcctcatcccatccctccccccccctccaaagaggatgtccccaccacactgctctaccccaccaggcctccccattggttttcttatttctgtataaacagtttcttgagttttgtcttattccaatggtgtattaaggaaaatgttttattatcattgatcaggtcatctgtatccatgatgtttcttccatctaccgagtgcctctccttttggaggagcaaggtgtggttaaatattttcaagagagattgggcctgcccatcaatgattgttcaagtaatttgcttttcaagtggaaagccatggctgacaggtacgtaaaaggaattctgtaggtaaaaaaaaaaaaaaaaaaaaaaaaatttaacataggatttctaaaaaaatcgtttcctaattctttccagacccagtttttataaacaacaaataggattgtggtattaaagatgaacatactacagcttctggttttatgtgggtttcaactgagtttctcatgcttttttggcaagtgctttactgaccttggcctctttatgtaatcatttataatgcctgggtctggaggtggaagtaagacctactttaaaggaccacttgtttagaactttgtatgcatatgttttgatgtagatgtgtacctgttgttagagtgtttctctgtattctttgaagatttctggagctgttgacttttctgtacttaaacccaagtgagttagagggatttggattctcaaaggaatatttttaattctcgcagtatttttatt

SEQ ID NO: 36345 - DNA, 1166 bp, Mus musculus
cagttttgagaaactgtcataagtgcctgtaaggttgaccttcgaagatgttcagtttggtaatctagtctgaaaatagacctcaggcattctttagtgattgtccaagcactgagtttgggaacattgaacataatgaacaaaaacacaagttttaaaaataaaagtacatgtgggctggtgagatggcttcgtaaaggtaaacgtccttgctgccaggcctgacaacgtgagttcgatccctggtaccacgtagtggaaggagagaaccagttgctataagatgttctctgaccttcacacactcacttgctcttgcacacaggcatgccgagacccacagatacacacacacacacacacacacacacacacacacacacacacacagagagagagagagagagagagagagagagagagagagagaaacatacaaacatatgcacacggtcattatttaaaaatatttagaaatggtggatagtcaaccttactttccttttgtgttgatttcagtgggattcttgtgcccggagggtttggaatccgaggaacattgggaaaactccaggcaatttcgtgggcaaggacaaagaagattccatttctgggtaaagtttttgtttattgatcctatgagtttaagttttttttttttcagtgctaggagttgaaactaggactttaagggtaaatgaaaggcaactgtgctattgaggtacatcaccagccctttttcaggtttttgacataaggtagatgttataccttagtaggggtaacatgtaataggtttattcttgtgaaggtgtgtgaacttagttttaaaagtcaggcaccaagtggcttactacacggcttatcaaactgaatgtagctcctagcttggttttgtaaataaagtttaattgaaacacatccacccaatttgttttgcatattgttcatagttgcacagtcggagaagatccaatgacttgtaaagcttagaattagtactgagtttataagaaatagttgtcttctgaatagcaaaaatctggaagaagtctgtttctatagtctttttaccggtcctcttagcatttccagcaaaagccattcaacagaacactgtaataacctttctgttggaaaatgatgtgcttaagcagtgtgtggtt

SEQ ID NO: 36346 - DNA, 1144 bp, Mus musculus
atcctagaggtagaagatctagtaaaactggcaaatcacaggagctgagtattttaaaaaatatttttaaaatattcttttattaaatgtgcatttgtatgtgtgtttctgggtgtaagtatgtgcactggttgtatgcagtacttgaagaggccagaagatgttggatttcccagagctggagttacataggtggttctgagccatctgatgtgggtgctgggaaccatcccatgtcctctgggagactgttaaatgctcttaaccactgagctttctctttaacttcttttaaaatgttttaaagaggcatagaaaaataagaacagaaaaacaagctcttattatttcttttgaatttattggctactgagtgagcgtttgatgaatttctaatcaagaatctcatcatttaagacactaaagaaaattcactttaagtcagcttaattatgggggaagactcatagtgtgtgtgtgtgtgtgtgtgtgtgtgtgtgagagagagagagagagagagagagagagagagagagactgagagactgtcttgattgctagttgatagaggagggcccagctcactgtgcactgtcggtggtacccattcctgggcaggtgggcctgggctatataagaaaactgatcaggatcagacagcaagccagtaagctacattcttccctggtttctgctttaagctcctgtcttgccttggcttttctgcatgatgaattgtgacttggaagtgtaagccaaatcaacccttttctcccaaggttgcttttgggctgagtgttttatcacatcagcagaaagcaaactaggacaccttaataaacaatctacagttctttggtagaataaagggtagacgtaaataaatcactgtacatttgtaaatacacatgcatatatttaattgtaacttccactttttgttgcctccagacttactggctgcaaatcattttaggagagtattcaccaagcccctcaaaggttaaattaaattgaggagtgtgactgcaatttgattatgttttgatattttattagtcctctaatgtattttgaagtcctgtttttatacatctctgtaggtcacccagatggcttgttgaaaatttaaaatttttacccc

SEQ ID NO: 36347 - DNA, 1199 bp, Mus musculus
ggtttggacttcccattgtgttctggatttcccggatgttttgggctaggagtttttagcattttgcgtttttttttttttttttttttttctgtggtgtctatgtgttttatggtatcttccctcttgtatctcttgtattttgttggtgatgctcacatctatgactcatgacctctttcctaggatttctttctccagaattgtctctctctgtgatttcttgatttctttattgtttctacttccatttttagatcctggatggttttgttcaattccttcacctgtttgtgttttcctgtaattctttaaggcatttttgtgtttcctctttaaggtcttctagctgtgtacctgtgttctcctgtatttctttaagggagttatttatctccttcttaaagtcctccatcagcatcatgagatgtgattttaaatccaaatcttgcttttccagtgtgttagggtatccaggacttgctgttgtgggagaactgggttctgattatgccgtgtatccttggtttctgttgttaaggttcttgtgcttgccttttaccatctggttatctctggtgttagttggtcttgctgtctctggcttgagcttgtccctcctgtgggtttgtaagcctgtgtcagcactcctgggagatgagttctcctttagcaggacccatgcatagagggctgaggaacacccccacctcctgtgtgcagatggagacaggaaggaccctgtcccagctgctccattgcttctgcagtctgtgtggtcctggctggtctaccacatgcattcctaaacaattttagttttgttttgaactttacaaaacatcatatgtaatgtcttttcattcaagcttctaacattcattgcatcattggtgtttttttgttttttggtttcttttgagatgtggtctcactatgttttagttatgttttctattgctgtgacaaaacaccatggtcagagagtgatttggggagaaaagtctttatccagcttacacttccacattgctgtttaccattaaagaaagtcaggacaataacccaagcagggcagaaacctggaggtaggagctgatgccaaggccatggaggggtgctgcttaccaacttgctcctcatggcttggtgagcctgctttcttatagaacccaggaccaccagcccagggctggctc

SEQ ID NO: 36348 - DNA, 2667 bp, Mus musculus
aattcataattgagattataatttaccttttatacagaatattgaaattgggtgagactcattgacaaagtattcttaaatattgtaaatcagtaatgttatcacagatgaagccttccctgtgagaacgaaagcttctataaagtgaagcactgttactaatgttgctttacttgttttatccttgctctattctaaatgggaaaggggcagcttttgtagcctaatattttagagttctaactttaaaattcatcggggatgctgtaaggtccatttcagaccccaccttgggatatttttgtcactttttgatgtgaaaacatctaacatcttgtcagatatatttataagcagatgtttaaaaattttagggagttccttagaatcattttgaggactttcaaaaaaattaatcttttagcttcaaagtcacatttttttaaagtaagtcaacaattaaaagctttcatacttaacaataccatatgatggctagttttaacttgttgggaggaagccttttctctggacctctccttagtgtaataggaccctgatgaatgtgacacactggtgaaagggagttttctaactgaacttgccactaattagcatttacttaaactggcaatcttctcagattagtagtaagtacagtgctttaggattctgtgaaatgtaggttatcttgtttactgttacataccatgaacttgaaaaagataaatctgaactgggcattaagaacttaagtgttcagccacaaaccaaagaacaaaagcaaatctgatgctttagatcattttactgtgaactaaacattctgattgtgtctccatcagcttgtgtactgtgtgtaagaatatatgcatttcttttgtagccacgccatgaatattttaatgtccctgtgtactaatgactgctcatcgactatgcagactttcacagaggaaatagagaactgatatacttatgaaagaaaatgtcctcagcttggtgactaattctcctgtaaaataatatatagcattttatagctagtacctttatgattgtatttttctgtgcctattcctaattctatttattctgtatatgatatgacatagttttttctgtctactactgatttcttctttacaaaatatgacttgtgaatgttttaatattctaaacacatacaagttatcattagtaaatcatctgtgattaatcttatgagggtataagagaaagaccgggaacaatcacaaatgtttaccaaagaaaatagttaggaactcaggcaaaattaggagcaccacaatatttaatgtagtttgatcttccactgttgaagaaaaccaagctttatttagcactaagattactttatagtctgtacaagctaatatgttggacagtatcacataaaaatgtgttgaagcaatataagaaaaaaatcaattgtataattctctaagatctaaggttaaaacatttcaatttttaagaaattttgtattgccaatatttattaagccacatttatgcagtgtcaaaagtcctttaagaactatcagaaagctatgtcacaaagtttcttgtattgttgctcagtaacagcccttgagtcagtagtactgagcctacttatgtgatacaaaattctgatattcattttcaatattcaaacatttatacttattagttaatggcttcctaattaatatattaagccttcttctaaacactcagtgctgtgttaacaatggttgtatattttggaatactaaaagtttttaatattaattttataaaaatatgcttttaataatatttatcaaattctactattaaaataccagataactcatttgtctatctagagagtttaaaacctaagtaaattgttactaaacagtaacttaagtggcatggtagtgcatgcctgtcatcctagtacctgggaggctgatgcaggagcaagatgagttactatagtacctagggcatccctgtctcaaaagacaaaaactaaatatgccaaaaactctaggaacttcagaaggtacccaaatgagtttcccactgaaagaagatctataaaatgtcttaggaaatgtagtgttaggcagctgtacaggtcagctctctccattaccatctgaaacttcacaaaacattggtctttcatttccatttttcccatcctcccacactacatgttgttcacctgattttaatgttgcataaatatgcattgtctcatgcctgtttgttttggatgctgtgtgctgagctgtaacaaaatgttgtgtttttgtgagggggagggggtatctgtatacagctgcttgctttaaattagcacattctcaaatagcttttcctgcatgtctgaaataaagtattgcatgtactttgtctcatgtgaatgacttctttcttctccatcctttttgataaaataacattttatattttcatctctccaggtaatttttttaagttgtgatttttaaaaaataacaatttctgagcctacaatagtactaagtatattcacattgttgtacaacagatccccagaactttttcagcttgcagaactgaaattacataactcaccagccaactacttcccatttctctcttactgaaggcaggccctggtaacaa

SEQ ID NO: 36349 - DNA, 1195 bp, Mus musculus
tgatcaattttaaaaaggaggggctagagagatggggatctgatatcttcttttgatctccatgggcaccaggcatgtatatgatgcacatatgtaaacacagtcaaaacactcacatacataaaataaaccttaaaagtttcaaaactaaataaaaaatcctgggcagtgatggtgcacatctttaatcccagcaccctggaggcagacacaggtggttctcggtgagtgtgaggccagcctgctctctacacagggggttccacgacacccagggctacacagagaaaccttgtcttgaaaaatcaatctctctctctctattatatataggaatacatacatatatatatgtgtatatatatgtgtatatatgtgtgtgtatatttgtgtgtgtatatatatgtgtgtgtgtgtatatatatgtgtgtgtgtatatatatatatgtgtgtgtgtgtatatatatatatatatggaattttcgaattccttgctaggaaaatgaaaaccactattacaccctaagattaagggttggaagctgggcggtggtggcccatgcctttaatcccagcacttgggaggcagaggcagatggatttctgagttcgaggccagcctggtctacagagtgagttccaggacagccagggctatacagagaaatcctgtcttgaaaaaccaaaaaaaaaaaaaaaaaaaaaaaagataaaagattaagggttgggtatataaacaggatggtagtatattttttttataggaagtttaattttgcaagtttctagagttctagaaatgcagggtgattccagtgatatacttgagtaaaactcaaacctcaaaccaggagttttgtttcgttaaaaccagcaacaaaatataaacagctttagtatttttctcagtaactaataactaacttttttgtctcattattctggtatatcttctttagagagatctctatttagatagttaccaacttctaatcagctacatcattttattattcagctatagttcttgatagattctctataccagtacctgatctccaaggtcatctgaaaatactttcagccacaaaagtgcctttattttgttttctttgtgtgtgtgtgtgtgtgtgtgtgtgtgtcttagagataggacctcctgtattcccagactggccttaaactcactatgtag

SEQ ID NO: 36350 - DNA, 1354 bp, Mus musculus
gctcttgccaggcatgtgcaaggccttggatcccttccccagcatgtgtaaacaaaaggagagctacatatgttaacataaaacataatagaaactgatattgtctctctttccaatgaacactttctaaagcttttcaagtatttactctgtaggccatgtgtttttaagaatgagtgaaaaaaattaccttctctttttcctttaaagagaaagttaaaggcagaatgggaagaacagcagagaaaagagcgagaggaagaggagcagaaacgacaagagaagagagaaagagaggtgacttctgtcataggaggatagaaccctgcgtatcttcttggtgtgcacgtgtgcatgtaaagagtttgcagattcaccagtgggcatgtcagggcttgcctttggttttatattttgctcatgttctgttcatttggaaggagtcagtttttgttagaaacactactagttatttggaaacactagtttccaaatggttctcctcttggggtggtgcaatgacagatacctttaccctaagtaagttatcttactgtttattttagagatgggtgaacattttccttaaggggtagatcatattttaggctgtgatatctgtatggcttctgtggacatccaggtctgccagtgtaccctaaagcagacatagataacatgtatatgaatggatgtggctgtgttgtagtaaaacatctctgtaaactgggcagctgccctgttttacactctgtaccactctgtggcaagtgttagtttcctctggttctgtcatatatgtgttgagttcttcacggaagaacagtattgtgaaaagttctaaacctactaaactcataaagagacttaatagctaatgacgtctcagcaagaattagtttaatagacattaaagaattaaaaaattattttgttattaaatctggtatcctgtctaactttgttgtcagagcaattatactcatttaagaaattctgagaaacctgtgctcgctctagggcacatgctaatgtccttttctaacatgcttctctccctgtctcttaatgcttatgcttaaatcattgttaaaacctttccttaataatccccaccattgctttaaaaaaagaaattctgtaatgtatatgtctatatcgtgtacatttcctgggattctttttaaaagcttggtttgttttgctgctggtcctcaactgtgtatttgtttcaaatataacatgcacagctcatcttgccttgaagatattttttctctttaccatcactaaatttgaatggcacgacattccatagtcactcatcttaaaatgaggagagatgtatggaaag

SEQ ID NO: 36351 - DNA, 1302 bp, Mus musculus
tcactctttatgtgaaagagagaacaggggtcaccagaggaatccttactcagactttgagactttgaaaaaggccagtgacttacctatccaagaagttacaccctgttgccagtgggtggttttcttgcctgaaagctattgctgccataatctgcttgtcaaggatgctgataagctcactctgggacagcaaatatctgtagtgacatcccacattcttgaaagcattaccaacgctcctgtgacacatcagagctttttgttgtctaaatgagtgaccttcacttcattccacctgctgtcccactgtgtgagactgcacctactcatcactgcgctgacattctggcaaaagaaatgatctgaattatcagatcagccttggcctgagggtacgagctggtacactgatgacagtagcctcaaggttaaaggtaagcaaaaggcggggacagcagtatggtggtgaacagaaagcaagtgatctaggccagcagccttcctgagggacgtcggcccagaaagctgaacttgcgactttaagacaagctctataaatggcaaaaaaaaaaagtctacactgacaacaggtatgcttttgccactgtacgggacaatatacaaagagggctgttgacatctgcagaaaaagacctaagatgctgtggctaaaaaaaaaatcagatggcagatctaaccgtcaagcaggtggctcaaagaacaatgatcctggcagtcaagaagtctaaagattattatgacatcagagagaccagctttagatacaccgctgaacactatcaagctatagacagtatttggcttggcctgggggccaagaaattcaaaggtgtagttaggtcctgtgactactatgttacaggactctctgacttggcagaaaaaatagtcaaaagcttcaaggcctgtgctataatgaggtagaatttctaaaagaaatcttcccaaggtaatggacctgcctttgttgcccaggtaaatcagagactggccaagatattagagattggttaaaagttacattgtgcatgcaggccccaaagctcaggacaggtaaaaaaattaataaaaccattaagggatccttaccaaattgacagcggagactggcgctatgattagatagctctcctaccctttatgctcttcagggataaaaacacccctggacagtttagactgacccccctataaattactctacagggggccccctccactggtaaaaatagcctctgtacatagtgctgacatgctgctttcccagcctttgttctc

SEQ ID NO: 36352 - DNA, 1101 bp, Mus musculus
gaagaattctgatggaggatggagtgctctttcattaaccttccaataactggtgttctctagggtggcggcccagggtgtcccataggtctccgtgcgactaggaggggcagcggtggcggcggtggcagcggcagcagcggcagcggcggcagcggcagcagcagcagctagcaacctggtcagggtacgctctccatccacagagatgagccgtcaggctgctacagcattatccactggcacctcaaagtgtccaccatcccagagggtacctgccttgactgacacaactgcatccaacaatgacttggcgagtctttttgagtgtcctgtctgctttgactatgtgttgccacctattcttcagtgtcagagtggccatcttgtttgtagcaactgtcgccccaaacttacatgttgtcccacctgccggggcccattgggatccattcgcaacttggctatggagaaagtggccaactcagtactcttcccctgtaaatattccgcttctggatgtgaaataactctgccacacaccaaaaaggcagagcacgaggagctgtgtgagttcaggccttactcctgcccctgccctggtgcttcctgtaaatggcaaggctccttggatgctgtcatgccccacctgatgcatcagcacaagtccattaccaccctgcaaggagaagacatagttttccttgctacagacatcaaccttcctggtgctgttgactgggtgatgatgcagtcttgttttggctttcatttcatgttagtcttggagaaacaggaaaaatatgatggtcatcagcagttctttgcaattgtacaactgataggaacacgcaaacaagctgaaaattttgcctatcgacttgagctaaatggtcataggcgccgattaacttgggaagcgactcctcgatctattcatgaggggattgcaacagccattatgaatagtgattgcctagtgtttgacaccagcattgcacagctttttgcagaaaatggtaatctaggcatcaatgtaactatttccatgtgttgaaacggcaatcaaatatttctggccagtgtttaaaatttgcattt

SEQ ID NO: 36353 - DNA, 1161 bp, Mus musculus
agggtctcctcagcggtctccctgtagagctgcggtcgaaagccggagccggagccggagcgagccagagccggattgagccggaaccggagctaccggagggcgggacttccggtttctgggcccaagacagagggcgggtcaggagtcaaggtctcgcgaggctgcggcgtgaggtaagggggcgtaagcaagctcctcataggctggcagcctcgtgccgggagcccgcgcggaggttgaattcggtaaggatgggcgactgtgtgtgaccgcggccgcggggtcgcagggcctgtctgtggggacaaggactacccctttggcctttacacgcactgtcttgaggtaccttggtccggggagacccgaaagatgtaggtccgagagtataacggaggggctactcgagcttcccccaggaaccggcttcccagggcgctctcgtcagtacagggtcactaactaacccctggggattggatccggtttggagatggggcgactgcatttctagacaccgaggctgaagacgctggaactcatccggattgggggggggggggacggataacgccaccctccagggtgggcattggtagcacagtagtgtcgggaacacaagtctgacccgtctccacttctcaagttcttaacatcttttttttttttttcttttgtgccctactccagatcgagagaccaggaacttcaaaatagtgcctgggatccggatgacagcaggcattaagggctggctactggactgaagctgctggaaacttgtaagtataactccacctcgtttgtcttttcctgaaaaagcttgagaaataatttgaatgtgtacaccttagtttgaataatctcttctgaaaaccacggttgctttttctcctgctttctggactgtaagtctgccaatctcccctttgctatccaaaagtttggttggcatgtgtgtgcccgaagaactgtgagcatgactagtatgcacaacaaagcttttctttttgaaactttaagcatgctgaagttatgcagaaacggagagagagttgcaaccagtgtcaactatctcagagtctagtgtggcctgtttgaggtcgtctttttttgataaggcaggtctctatacttctgtttatttctgtggatctc

SEQ ID NO: 36354 - DNA, 2112 bp, Mus musculus
tagggaggtacaacagttatgtgaactgttttaaggcaaggtcatgtatccttctctgggcatcattgaagtcatgttcctagacacttactgggtccactcaagggatacgtggaatgtgatttcttgagcaagaccatctattggttgccagcatgtttgaacacctgctgtgtatgaaaagttgacctagatggttcctgagactaaggactggtcaacgagaagtggtaaaactgtcaacatggcgaaatgctcaagctactgaatgacaggagatcatcgctggcatacaccaagtacctttctgacctgttctatgtatatgcattctcttaggaagagcccttctctctctctctctctctctctctctctctctctctgtatgtgtgtgtgtgtgtgtgtgcgtgtgtgtgtatgtgtgcacgcgtgcgtgtgtgttgttgctttttatgttctatggattgaccgatacaactgttgatgcttgtgctggccaaccctctgcttttatagtgcacagttcagtcccccataaatgcctttatggtttctaagcagaacagaaaaggtgtgctatctcaaaaccagctgctcttcctgccctctgtggaagccccttcctgtcactctggtcttgcccatctctgataagtattgccagtgtggggaaaggcttttctccagaatggtttatttagagcgtattaattctgaaactcgtcagagctcgcaggctttttgtgggtggaatttctcaatcgtaattaaggtttccagagccatgggtttttaaatcccaaactgtatgtgatatgtattattaatcctttgaactctttcgcatgggtttgtgtggggaacagactaaaatgagagcagcgagccacttgtgggtgttccattctgtcagtattgtgattctgtacaggagttttttttagcgacatttgcaaaacttttaaaagagtatcttaacatgcctattacttggttgccaccgatataaaagagatatatttgtgtttggtttctatggaaacaaatggtagagagtaatttttaaaatatagaagttagggcttcttttattggagaaaaatgaccttgtccaaaccgttcagtcttatttaaatctttatgcgctgagacaggcgtacaggttaacagtgccaatatccacggtagactgaggcatgtgtaacacttggctgtatttattctactctattatttcttctatgtttgcttctagcttttattaaaatatcattaaatgcttcagttgttctttatttaagatgaacatagaattgaaaattaatttgctcttgtgggcaaatatgtaatttatgaattaaaattgttttccttttttgaacaagtaaaaataaaatttgtgtgacagaaaccattttcaggcttcctggataccttagttgtcagtgttgtactggtcaggatgtgggacactcttccactgtgctactcataattatctgaaatgaaattagcgtggatgaggaatcgttggaaagatactgtgttgcttttgatgtcatacacatgaaaccagtgtgctaaaacatgctcatgtccagtaataaagatgagaacgctgttttaatagtcttatttttgtctcagtttgtcttattttgtggacaggatgttactcgtggaataacccctcctccacctttgctgagtggatctaatgtgttgcctggtctattagtaaaagaggaagtgtcctttgtctaatgtaccactctgtcatcttttatttctagaatatatgctcttttgtattcttgaaatagaaagttcaattgcacctttgtctcctgattccaataagcccttgttcctccctgccagtcatcacagaaggcaaatgaatgcatccacacactattgtgtgtgtgaactacgtaattacactttttatgttgccagctgtcttaagagatatttgaggtctggagagatggctcgatggttaagaatactgactgttcttccagaggtcttcagttcagttcccagcaaccacatggtggctcacaaccatctgtaatgggatccaatgccctcttctggtgtgtc

SEQ ID NO: 36355 - DNA, 2281 bp, Mus musculus
taaagcagcacatggaagggtgcctatcttggaaatgagttgtttggctagagagacgtttgaggcattgattattagagactatagctagttaggaaactaagtaaacgtatgtgcattgtacaaattaatagcataaacgtaatttatttttctttttgatttgaacgctttcaaagcaaatttttatcatgtaaatacactagctgaactgaaaagactaatatgctttgttgtagccaaaaaaaaaatgtagtctgcttttttaaaaattacagaattactagccaagctgacttattagtttttctatactatgtatgtaaaatatgtatattaaaaaaggaagcatacttaaataatttatgtgatcatgactttgtaacttggagaactacttccagatgatagtcgatatgcttttggaatgtaaagctatttaatgccaaacctccttagcctttgtttctcagtgtcactgagcagcctgcctcttattaaatccgggctctttaatgaatactctgttttcgatacaatatgaaaagctacatgtggttgggttttctttgatttctcttattagtgcccagaaggaacgtctctgaaagagcccccctttctagtcaattctatgcagtttccctatgtttggacactgaactttttgcctgggtttattataaggccctacttttccattgtgccatcttcatcttcattccagggcaaaggaatctcctctgtggaccacaaatgatgccaccttcaccctcgcttttaaatgaaaggcattattatataacattgtttgaaagtctagttgtccattactataaataaccgtgggttccaaatggttcttgtgaaaattgttgatgagaaggaaactttaaaagtattcatgtgtgcaaatataaaagcaaagcagaaaggcttagagaatgggaagaattatcacttcccgtggcttctctggcccactgactgctctgccttccgtatacttagactcattcatatggctcctaaattcctatagagatacaccttgcagaagcagaggctaatgaaatagctttgtgtaatcattaacatgaccagtttctgtcactttcgattcaaatccatatctgcctttttaaggaagaaagtcctctgcctagcaaatgaatattccgccatgtttggagagttgttcttctcaggagtagagttgggggctctcatcttgaagccgttgattcccagaccgagtttggaggagtgatgtaatggagctccttaagaagtcggccgaggaaagaaaaccttaaagggacactagtgtgatgctttgtcttaatgtgggtttttctgtttcagtttgccacctccagatgtgaaacagactgcagtccacactaagtactatgtccctgtatgttcacagtgacttcccaagtggtagagttgggggccttaatataatgtcatcccaaagtatctgtctatgcttttcattcctcatcagataaacaggcaattaattagccaagatgaggaatataattgtcctaacagtgtccctttaatgtttcataaggaaatcatgttgatacactaaacacccttctttgcttgttgtctggtcagttgaatttagtaacatcttgttagcatttctgtgtggtgaatgtgactaaaaaggactttgggaaattaacataatgtcaacagtaactggactcttctgctaatcttgattaatctatagagttacatttgattttgtcctgtctttatttggtttaatctaatcatatgtgcatgattatttttagtattctgatcaataattttctctttaatcatgtcattgctttttcatgatcaaattaccagagattttcattttgatttttattttcactcgggaatggaaattaatacattttccatgaaaacattaataaaagatcattagcttgatctgcaagtagcctaaaatacaaatgctggttaacctagtctcaaatttcataaaaccataacttttatatcttgccactaattttgactggatttaatagcactttattgtacaattataaaaaatatattcctggaattgttgccagtgtaatttctctaacgttctggtgcttttcatatattttcagtatttttattactatattggtattttctttgtataaattgatcaaaagaacatgttttctattttaatatgttttagaaaataattacatttatgaaataaatatcatcaggaaaaaaa

SEQ ID NO: 36356 - DNA, 1146 bp, Mus musculus
aaccacatggtggctcacaaccatttgtaatgggatccgatgccctcttgtggtgctgtctgaagacagctacagtgtgctcataaaataaataactcttttttaaaaattaaaaaaataaaactaattaaaacttattggtgtgtgattgggttcatgcatgtcacagcagtggaggttagaggacaacttgtaagagtcagttcttttccttctatcatgtggatgtgggtcctgggtatcaaactcagacttggcaccaactgcaaaaagctgccctcctaggcagttttgaaatgttagctctctcctgtaagaaaggactatggcgttggctccttcccacttctttaggccaggtacccctgttctgctccctcttcagtctgacatacagtaacgaggtcagtttgtaaaatacagggagactttttcctttacttcctagttaggacagtcacagaaattgtagtctgctttcttacaaaatttttttgggttaatttcaggacccagaagctccaagaagaaaaaattaaaagtgaggctgaggcacttgagagacgggaacagaatctgaagaatattgaagacacctatgatcagaaactcaaaactgaactgctaaagtaattgttgggtgttttaaaaagagtaatatgtttgaattaagttggtgaaaatgtagccaaaattgatgaagtaataagacgaatatttacatgacaaaattcagtgtttgagaaaaactattttctttgacaaatcatagctttgtgataaatatttaagaggtttctaaagcttacagtgtagagaattacatcagatactcttattcataactcctcgggctgtgaggaattgtgaggactttaaccttacatatgtaagtgtgtattagattatataattattccattgttttaacccttggatgttatacacattttattttatttttgagtctcttttttttctttttccaattttttattaggtgttttcttcatttacatttcaaatgctatcccgaaagtcccctataccctccccctgccctgctccccaacccacccacacccacttcttagccctggtgctcttctgtactgggccatataagtaaccttagggcaccatatg

SEQ ID NO: 36357 - DNA, 1101 bp, Mus musculus
tctagtgtgctcctacatagataccaaaatacccagaaaatttactgtccacctaccacatttccttttcagagcagaaaagtgaagtttgatgtagtttgttcttagtataagtagagaattaaatgaataataacctggatgtgatgttagtcgtggtttcttaacttatactgaatgagctactgtacagaaaacaaaaaaaggtcctgacatgctatctgaccaaaatcggccaggtaacacctacttaggttggtgttttagtctcgtgaatataccccgtcatagatgagaagatatccttttatctgtttctgaaaattggaatagcattacctgtctcttagcatatagaacctttctgtgcctatgatttctttaatgtcacttaacagtagatggagagttgttgatccaagctatataattggccaggacctgaagacttttttgaattgaaatgcttaggaagttttctaatatctaacatgcagtcttgaaatttgcatcctgcaccgcctgcctgccccgctgctgggaagttatgctttgtatgtaacagggagaatggaaattaagcagatttgcatcttttgttatttccgtgtatgtccagtgctggaagcccttcttttcctaatggtcacaacctagaagcattggcttttcttccatagtttgtacacttaagttctcctttaattttgctcttttcgtggagcctggctagctttgagcttaggacctgcctgccctagcttccgtggtgctaggatagcatgtctgctttaatctgtgtatttggggatcagctaataagcacctattttatccatagggactgtaacattttcaaaagttgtagagattaagatgcttagtggcttctatattagatagtatggttatagagcatgcctatcttggcagaaagtttactagcgtggacaacaaaagtgtggagcacctttgcccagtgcccagcatgaggtaagcctaagaacagcagctaagtctaaatgctgcatacgttctcttacatatgagagctaggttgaaaaacatttgcaaataaaagaagaagtggggactgtttga

SEQ ID NO: 36358 - DNA, 1754 bp, Mus musculus
tttctctgtttagccctggctgtcctggagaccaggctggcctcgaactgagaaatccacctgcttctgcctcccaagtgctgggactaaaggtgtccgccaccactgcccggcttgtgctctttttttttttttttaacaaaatcttaatcttatttttgcctttgggttttagttcatgaaagatgtcattatatagccaaaggtggcccagtctcatgagtgcttgcattataggcgcacctggctttatatactgctcttactacaaccctaagactaaggaaagagagttatttgccagagtgtaggccatagaaagctatcacactactttgtggccacttagtgctttactcagagtggcactgtagctccacactacctgagagcatgttagagatgaaactcttgctccttaagtcctgatctgcattttaacagagtccccaggttatcctctggggtattttgagaatcactgacatacatagcattaggcctgaagttctcaggaatgactatatattagaattttctggagaacattgaaatgtactggtgccaagggccaagcctatacagttcaatatgaacctatggcctggacccagtaatcaacactgctctggtcatttcttggttcctgttaagttgcagttagagttaggaactacctgtagatagtctctcatttgagcctttctatagttctgaagaaattaatgttattctggagtttacagatgaggaaagcagcccacttgcccaggttacacaactgtatgtagtcggcttcacactgatcccaggttttccagcttacttctcaagcaggtgtgatggcacatgcctgtggtccaaatactagggagaatgaggcaggggatttatgtgagttccggccagtttgacttgcaaagttcctgtctcaaaactgttaaaagggaatcctgtttcaagcctgtaatcatagcgttgggaatgctaaggcagaatcccatagttgagggcagcctgagttagatagagaaacactgccaaactcaaaaatattcagtctgaggatgacttaatattgactttgtaagaagtatactcttggaaataggtgctaagcaaatagtgtttgggacctctaagcttatgtgaccggagttttactcttttgtccttaattttctcattttcttttgactggtgaaaagttgcagtgtaagttagaatttggctcgaagcctgcttccttagttgaatgccctgtgttttgtttttttttttttttttgagcacttcaaaaagtatgatatatagttccttaatgttaggactctatataccttcagaggcatgtgtgttgggattgaaattcaaattctgatcatgtgaaaatggcactagttgttagaggaagtctctccttcaatctcagcatttacttacatactaactgaagagaaaatcacgtctcctagttctttgtaaacagtgtttactgatttgtatgcttattcacaagcctttttatgtgaccatgactaatttttttccttaaaaataataaaatgattgtctttctgggttttgatttttttttaccatgtaaaacaattttatacataatcaacacaaaaccttgcatatatgtgctccttttacagttaatcaggtgattagatatacattttctcttttgttgtttgacaacaatatgtgaagagtttctatttttataagactagcttcactctgtt

SEQ ID NO: 36359 - DNA, 1374 bp, Mus musculus
gacaaacccgatatggctgagatcgagaaattcgataagtcgaagttgaagaaaacagaaacgcaagagaaaaatcctctgccttcaaaagaaagtaagctgttcgcccccacccattttcagaacgggctgggcgggagcagagcagagcggggagcagcggccgggaggaggaagggaggggcagcagggaggatgggggggggggctgcgggggaggagtcgacagtttgatgatgatgaatatggcctgcaaaggttaattaaaaactgttttgcagtcaacaagcgccgggctctagtgatttaataatggaatatttcatattccatattgtgcatatacatttattgggtaactgtacttctgtttagcatgtcttgcttagcgaggctgctatgtgtctttctagaatttttatagggtttttaaatggaaatcatgtcattttatagaatgctctaagtctccttttttttttcttttcttcacagcaattgaacaagagaagcaagctggcgaatcgtaatgaggcgagcgccgccaatatgcactgtacattccacgagcattgccttcttattttacttcttttagctgtttaactttgtaagatgcaaagaggttggatcaagtttaaatgactgtgctgcccctttcacatcaaagaatcagaactactgagcaggaaggcctcccctgcctctcccacccatctgatggtctggctagcagagagggaaaagaacttgcatgttggtgaaggaaaaagctgggtgggagatgatgaaatagagaggaaaattcaagatggtcaaagatgtcctgcaggatgtaaaatgcagtttaatcagagtgccatttttttttgttcaaacaattttaattattggaatgcacaatttttttaatatgcaaataaagttttaaaacctgattggtgtgtctgcttggtgactggaaggagtagttaaatgagtgataaaacccttgcaaaactgccttgcctcttggtcactgggacatagaagagacaaacgtaaactgccttggcctaacagctctggcttagtccaggtctgtgaaataccctgtctatagcaaatgattgggaggtcatcataagagttcctcatgggttacatggaagagttaatgaaaatatttgaaattggtatagccaccatggttggaagaagggggctgtggaatgaaggggtaggggggaggaactcacgtgtagttagagcctttcaggagttttggaaagccaacattgaatttattacatatcactcaacgcaaagggtgttggtttggtacactagcattaggtatcaacatgaacttggctaaccaactatctggtattg

SEQ ID NO: 36360 - DNA, 1740 bp, Mus musculus
aataaacttcaaagaaatgcttcagaaagcattgtgaagaagaatctcattgtgggtggcattcttgataaaatgatcttttagtgaagtgtggaggtctgtgcccgtaatcccagcactttaaaactaatgcaggaagagtaccacaagtttaaggccagcctaggctacacagtgagttccagctcagcttggcctggagagctgagactgtgtgtcataaaacacaaacaaacaaaaggcatcagtaagtgcacaacctatcattttccttctcacaaagaagaggatttgcctgtgtacctaaagcttaggaatgcttaaaaaaaaatccccccccccttgctgagtattgtagataaattcccagccctaaattttgcaggtaagaaattcctatccatctgagtagcacactcaaccagcactctggaacagcagaggagcagaagtcaaatcaatgttacaaagtataatttatgttcctatagagactggcattttgataataccttatttgtaactgttctgaagaaagtggttcctataacctgggatgctcagctctgtggtacagtctgtctcaggcttggttagacatgtgtcaaaacttgtttgagatgatgcagctgttacttgtgataaatgtgcgatgtcttaatttcttgggttttatggctgtgctgaagacattcttgtgcatacccacatggagatagctcagtgtgtgtgtgtgtgtgtgtgtgtgtgtgtgtgtgtgtgtgtgtacatgtcccaaagcattggcatgacaaaagccagttggtaatcattttatctaagatatttaaagcttaatgtgtaccatggatcttaaaataagaatcttcagttttaaaaccctgtcataaaaatctgcctggctgtcctctgaatttgagaaccaattgtttctgtccttacttggcctgagttagtattttaaagtacctctgaatacatttgtgaactaattagactggactgggccttatacagtggaaatatggttttaaatattggtttcagtttggctaaaatgacgaaggctgcctcatgagcagccttatttcagaactttcttgttccttgctgcttgtggtaaagaaacataatggaaattaccaaatagatcagctctgtccaactctatgtaaggagagcatgttagtcatatctacccaaaaaggggagccaggaaatagtgaatataccaaagttgtttatcctccacataattttattagtttacttatagatgttcatatgctaactttcctttgttagatacaatgtcgactaaattcaggacatttcttgcagcgcttgccctggttttagagactagagaattttgagatctggtgccatttactaagacatttcaataaaatcatgctgactactttctttcatagttcttgtcatccttttggaattctggttttggatgaaatgatctgctgatgaagtgcctgagaatgttcattactataagttaaccatccagtttgcaaaaggagaggaaagccagaaataattaaaatgtcctcttcacgactttttctttgtgaaggacttattggctatcttctctcacaaggcatcatcgatgctccacagagcacatccaaattgatcattctagagactatctttcaaattaaagaccaggagtggggagatggtacctgccaccaagctgacctgagtttagtccct

SEQ ID NO: 36361 - DNA, 1507 bp, Mus musculus
acattgccgtgttttataaatggatgctaggattatagtaaaaacttaagaaataaaaaatgaaagttataacatagaaaaagcagatttgctatattttctagagtaaaacctctgcaaatgaataagaaaactaagttttaaacaaccagtatcccgagaagggaccatctgttgtgggtagcagcacccctgagtgttcacactgaaaatcttcccaagagcgatagttggctcagctggctgtgctgtctttgaagctaaaacccacagttgtttgttgttccccaaagaaatgactgaaggaggtttgacaaaaaacataccatatacattctggcttttcagcttttaaagaaatagaactgactccctgtcttttgtgttttccctgtgttattcaggtgattgacatttcgatgatcctggctgaagccattcgaagaacccacaatggggaatccgtgtcctatctgttcagccatgtcccactgtagtctggattggaatattgaagatggagcaagcctcctccaacttctcactgtctttgtctgcctgctgttttagaattaggactccgcaattctaggatgatcactggcaaaagcatctgatctgtgtccactctaagagccctctgtctctccttctaaagctcaagactactactttccagtcctgggggagggcagagaaaggtggtggttatttggtcgttaattgaactggtgtcaatgagaactcatcttttccctcgttcttttttagtactttgaggtaacaacttttaagcctaaaatcccattgtggaaatttgtcatacatacattttgaggatgccaaaggtgatttcaaatgaaagccttctgtgtaaatatataataatgcctgtggatatttggggggaaatcctaaataacctttatgtcagagagaaccttggaaaatttatactatcatgaattttgaaattttgttgtttttttcttaatgataactgggtttattttattgccctttatcaggactgaattttattgggcctaagatagccactgacatactgacttttcttagtagatattagacatattaaagacaatataaggctgtatcattttttaattgccactttgaagatatatcataaatgacaacttaccggaaactcccaaattatgatcagtgatcactgatttggctaccatttcaggctgtagtcaatgagtttgtgaccacgttgatgcacaactttgtctatcccaggggaatttctctttagaatgtagctcatgtcctatcaccttattctcagacgttaacaatagcctttactttccacattccccaatagtttcttgttgtagatgtccaccaaaagaaaggctccttgaaaccccctcacatattttaggttgattattattttattttttcacatacataaaatggggaggatttaagagtgccaccaaatacacttattcaaacagagcttactgag

SEQ ID NO: 36362 - DNA, 1142 bp, Mus musculus
tcctagaattgtgagtcaattaaaccccttatactgtctttgtcagggtgttttatcacagcaacagaaattaaactgacgggcaagcggtttgatatattgccagcatgattaatttgaatcaagttcatgtcctttgtattttgtgtttggctggaggataatggtacattatggcttcttcagtaaattttgttcttacaagggtcctgtccaattgtggggcatatgttcgaactccagattcttctttaaggaatacaaatattgagacacatttggtggtgattgttgacatactgatacatggtaaccttttctaaagtcaaatttcctaacttcttctttattccaaatttatgacagagaaactagctctgcctgccacctgccacctgtcatttgcattgcaggaaatgttttggtcttttgctctgtcccctgattgcaagcattgccccaactactatgccagcaaagagagctctatgggcttctcaaacaccagtaaatttgttatataattttttattatatctagtggtgtgtgtgtgtctgtctgtctgtcgtgtgtgtgtgtgtgcatgcgtggtgtggtgtgtctgtgtgtatgcatttgaaggtcaggacaacttgtggccattgcttctcgcctccaccatgtgagtcccagggattaaacacatgtcaacaggtttcattgcaagtgcctttaccaactaaatcatcttaacctcaccctctcccacccccagtggctttaattgttttcagaactgcactgtgtgaccagctatctaccagtttccccattgtcaaacatttagatatgttttccatttggagccattttgaacctgggtcccatgcctttccaaacttagctgctaatgcacaagataagactatcatcaagcagcatttgatcgaatggcatttgagagacagtaagtgcagctcaggaaactgtcacttactggtggagagaagaaacaggcctgcaacaaatggctgtaaacagaatggcttaaaacagcagccgtgtgctcttgcacaactctggagtccaacattgccaaatcagggaccaacatttgaccgatactgatggatagtaaatgaaattgatgatggataaggtg

SEQ ID NO: 36363 - DNA, 1276 bp, Mus musculus
gtgtccatagcatctcataagtcacaatcaggattatgactgcagagtcccatgactatacctactgctggattgctgaagttggaggtggtctcaggaagtctcagagactatgatattaaccaatcttgtgatgtctaattgctaattgtcaacatgacagaatctgggatcacctgagagatgagcccctggctctgcttattggggggtgtatcttaattgtgttaactgaggtggaaaggccaagtgtgtagcactgttttctgactgggccctgacctctgtcagtgggaaagagagctgggaagtagcgtgcatccatcactctgctttccgattaagagtgaagtgtgggcagctgcttcaaggcccctccatcttaagttcctagccaggatggacttcaccgtgaactgtgagccaaaataaagtcacttttcttagagtactttaaatagcaaccgacaaagaatcctaagacagatggcgttgttcttttatagtgtcgagatcggtgaaagtgtgagaggggaagatgtctacatcatccagagtggctgcggggagattaatgacaacctgatggagctactcatcatgatcaatgcgtgcaagattgcgtcctcatccagggtgacagctgtgataccctgcttcccctacgcccggcaagataaaaaggacaaggtaggcgaggtgtgtcctgccctagcaacccagtgtgctcaccactgtttcctcacctattgccttcattagactatccagaagcctcagctttcctcttcaatgtaaatatgtgccctcaccttgtctattccagatttgtcactgaacccatcacatgtatcaacacaggcaatgtatgtttcaaaggcagtcaaataccattatccttgttatcatgatagagtgttgtaaggtggtgcatagagttaaatacaaacacacacacacacacacacacacacacacacacacacacacacaccactgaatgagtacaagtgaagaggagaccatccaaattacttcactgccttggatcaaggtgaggtctccagttgaaacattgtgttctttgtttggttggttgtttttctgagacagggtttctctgtgtagccctggctatcctggaactcactttgtagaccaggctggccttgaactcagaaatctgcctgcctctgcctcccaagtgctgggattaaaggcgtgtgccaccaccgactggcgcaacattgtgctcttataagtggtttccattgta

SEQ ID NO: 36364 - DNA, 1193 bp, Mus musculus
gtccatcatgagctccagatgcgggccatagagctgcaggatctgatgtttgccctgctgggtgtcggtctttctttggacacacccttgcttgctgtaattcccactcttcctgttgggaatgggagtttttcttctttgccattgtttattgagacattgttagttgtttttgattttatagatgttcacaaataagagattgccttgagtctcagagaagacattgaactgcttaacactgctgggactgctaaagactatggagagttttagagagggactaaatgtattttgaattgtgagatgaaaatgagaatttgggggccagaggtggaatgctatggtgtagtggtgtgtttgggtgtcaggttggctggggtagactagagatgcttgattttgattattaacttgggtggaatcagaatcaccctggaaacatgcctttggatatgtctctatgaagtttaactgaagagggaagacccaccctaaatgtggatgacactattttaggacttggggtcttaaactgaatgaaaaggacaaagtgagcggaaaatcaaaattcgtctctctttgcttcctaactgtcagtcttgctgccgtgacttcccctaccatatggaatgcttctcttcaaactgtaagccaaaataaatgtttcctcccttaagctctttttgtcgggtattttgttacaggaattggtggggatgaggagatggaggttgggtgagtagtaattaggattcctctccatttgacttatgtggtgctggcttaatgcttgtgcacctgcagtatcctcctcactgttttcagtgctgaaatatttgctcctggtagatccagggaggggcaaatcagttgagtacccactgatgactacactgctctgcagtgggtagcgccaattcagttgtcacacagatggcccttattaaactaaataggccacaaaccaaaagcaaaggtcatgaagctgggaaaggaagtgtgtgtgtgtgtgtgtgtgtgtgtgtgtgtgtgtgtttgtagtgtgtggtgtgacatggatggaacagggataagaggcgtgtggtagaaggtaattagaatacattatactcatgtattcaattgtcagactacaaaattgttttttaaaaaggtgcagtcatggacccaggaggtgaagcagaagttga

SEQ ID NO: 36365 - DNA, 1116 bp, Mus musculus
gtgatcgacagaagccgctttaatgagtgttgtggaagtaatcaatagaatcatgttttctttctagtacaaaaagtgttgaaatgttttcacagttcattggctgacagctaatatttagcttcagggtgttcagttcttaatatgatgctcattggtgcctttttaattattctttctataggtttttagcagaataccatgatgacttcttcccggagtcggcttatgtcgctgcctgtgaggcacactacagcaccaagaaccccagggcaatttattaaacttttgatggttctgtaaaaacaactgcactatgtggctttatactttaggtcccaggtgaagtgttaatgagatgctagacctatcctgggggtactctgacagaaacaggctctggttttttttttgagttcgtcacattctattatttctgttaagaattattttctgagctcaccatggtggtccttgcctatggggagggagtcgatttaattaattaattcatcatttttttaaaaaaaatgtactgattacttcctgggtgcctgaacatattccaaagtaacactgctacacaagctgtgtgtgctagcaggctaaaaacagccatagctgtcttcatagggatatgtccatgaacgtatacttaggttaaacattattctggtagacagcgcaggtggttgttagcaaggaccatactgtttgattacttgttaatgttaaacaaaaatggttttgaaaactgttttctgttcaacagatcttagtcagtgcttggaagccgcaaagcactctcaaagtatttctgagggaattgatatgggtggcaaaagagaacttacagctatgcattgcttgtagcagttccctttctcagaaacattatttttgttgctctaaataaagcattgcctgtcttgtttgagattttacagccatactctgctatgtaatgttatagttccttttctatgaaatgttattttgggtgatctaaataaagctttgccagttttgtttgaaagaagcaagaggagttttgctctggcctttcctggttctttttactgcagggcaactagtcgggtaacctcttcactccca

SEQ ID NO: 36366 - DNA, 1470 bp, Mus musculus
gtcattgagggtacttttcgagtgagtgatcatatttgatcttgtatttaacaaagatgccatgctcctttaaattttgaatcacattttccattgcagatgataggtcagtttaatttttttccctatttggtataagttccttagttttcccactaagtccagtatttcatgttattttctttagacatcttaacaatctctgaaaaagaggttttaaaagcataaaaagttgtttttattcttactgtttcctcaggagtatttgagatataaaacctgaaagtgtgtgatgcttttacctgccaaataatttaactatattcattataaataagaagcacttgttcttgttttaaaagtaactaatatttctaaaatccctttggtctgaacaaaatatacaagtatataccgaatgaagtctgcaagactgatatgtctatgtttaaatgtgatttcagatttgaccctgatagaaatttcaacttgatacataaaaatttcaaaatacttgttttttcaattctgtcccaatatgtaactatcaatgaaaagctgatcacaccatccctagaagatgacaaattatcttatctcatcccattccctcttcctacttggagcttgccaccagtcgtgtaatgtaaaccttgagagccgggctccaatcacagtgccagaagtgtttctttgacgaataagattatatttggctaagtgttagaattcacaagaagtgcattttttttcagatatgaaatgtttgcaccaattcaccatcattttgatgttttaagcatgtgctgagtttgctgttgaaaactggttgttttgctgggcagtagtagcacaagcctttaaccccagcattccatagatctctgagtttgagactagcctggtctacagagtgagttccatgacagccagaaaaatcctctctctaaaaaaacaaaagaaaaagaaaagaaaactggttgtttttattttaattatagcaacaccttagaaatagctttttcttaaatgttgataatatgaaaaatatttaatttatcttaaatactgtaacatttagtggacagaatttgtgtttttgagttatttgacgtagatttctttgttgtatgatgctttaaaaatctaacatgtgaaaatatttgtattttttaaataaagctgacagttaaaaggttctgaaacttcttagagtgatttttgtagttacttaatttttgagataaaaatttatctttactaaatgcagcagtggtctcatctgttaatcacataattttaaactgcataagaatgtaatctcttttggcccttctcaggtcacaactggattaggactggaaagtaaattaaagtgtatagtgacagggtattgtgaaagtcaactgtcgtataaactcaattattaagatcaacaatttttcctatgccctttcaccacttctagaa

SEQ ID NO: 36367 - DNA, 1149 bp, Mus musculus
cccctcggaagcgacaccccgcggttccctaacttctcaccctgagcggcttaccggccggccggcggagttaaaaaacaccgcctggcccgtaggggcggagacggagagaaggctcgggcgcctataggccgcggagcgagaaggggtggaccgacccgcccttaaacacaccgccccgcacgtaggggcggagacggagagaaggctcgggcggctcgaggcctcggagcggaagggggtgggagcgatccgcccgacctgacgaccgttcctctcctcagcgcgagcttgcctcgtgctcccggaagtcccgccttcggaacaggaagtaacggcgcccgagaacgccggctgtgaccggacgttagcggtgaccccgcgtgaggaaaaaccgcgggtgcagccgagcgacttcggctgggcggttcgacgcgctcgcggccgcgccgcgcgggacaagtcggagcggagacttgggggcagggcggcgcccgggttcggctggagccggcggctgccgagtgagttcggctgggcaggttgacgcgctcggggccgcgcggcgcgggacagtcggcgaggtgacttggggacaggacggcgtccgggtccggctggagccggtgcactgtgcagaccgcggtgccggtgggacgcgcatagacgggaaggcaacactggtggcttcctgcccttcgccgctccttgcctcccgttttggtgacttttttttttttaaccttcctattttccctgaggcgcctgccctactgggaacacgggttcgaggctagttcagtgtattttcccttggaccccaccatcaagactacacccgtcttcacgacgtggttgcatcttacaagtttccagactctggcacgggtccccaaatggtggcataggcttcaaggtattttcccaatggaggcactgttttcaaagtgtcccctcaccaccccccacccccacccccgaaccagtgccctacctcttactctcccaagggatggtgaaaaaaagccagggccagccaggatcagaataacaaggggatatcaactgtttagcctccacgttttaatctgatttcttgctttggcagctgggtattttagattgggagtgacccctgtgattccagcc

SEQ ID NO: 36368 - DNA, 1146 bp, Mus musculus
caggccctgtggctgttttgtaaataagattttatgagagtctggtcgtactctttaagtacaaatcatctacatccgctctaatggcagggttaagtaggtgcgagagcagaagtctgtccgacaatacctaaaatgtcgatcctatagtccttgattagtaagatttccaccccccaccccctaccaaatgagaatgacattatgaaagtctgtcatggttactttttctctgatctatctttcttcatacacaagaagctattgttctcttactctcataaatatcttctcatgataaatcgagatgacgtcttagcggccggctggctggctttagtcacaccgctcagaaaaatcaacaacagataaaccaagaaaacattctttaagtagacggctaagcgctctggaaccaaaacctcctgttagtaaatgtgctagacctgtttaggaagaagacctgcttcgacagtcgaatacctccaaattgtcgtcctaatggtatctgctgctccgctgacatgcgtgtgatgtccacagctcccaaccctcccgcgattagagaagagctctgcaccgcttcctacgacaccatcaccgtccactggacctcagaggacgagttcagcgtggtctcctacgagctccagtacaccatattcaccggacaagccaatgttgtcagtgagtatctctcggctgattcccttccgcgttcgacgactgttttcagatgagctgggtgaagggatctcaacacagaaaggagatgatgaggactgaacatgatgacaatatttatcggcttctctttcctgttcaaggaatggataatgctcacttgtatcgcagtcatgagaacagctgactaaatacccatgaaattaacaacctccggaaaaccacatggatgtagttttttttttttttttttaaagatttatttattattatatgtaagtacactgtagctgtcttcagacactccagaagagggagtcagatcttgttacagatggttgtgagccaccatgtggttgctgggatttgaactctggaccttcggaagagcagtcgggtgctcttacccactgagccatctcaccagcccggatgtagttttaaaaaagaagccggtaacca

SEQ ID NO: 36369 - protein, 15 aa, Artificial
  biotinylation sequence
GLNDIFEAQKIEWHE

SEQ ID NO: 36370 - protein, 14 aa, Artificial
  Biotinylation sequence
GLNDIFEAQKIEWH

SEQ ID NO: 36371 - protein, 321 aa, Escherichia coli
MKDNTVPLKLIALLANGEFHSGEQLGETLGMSRAAINKHIQTLRDWGVDVFTVPGKGYSLPEPIQLLNAKQILGQLDGGSVAVLPVIDSTNQYLLDRIGELKSGDACIAEYQQAGRGRRGRKWFSPFGANLYLSMFWRLEQGPAAAIGLSLVIGIVMAEVLRKLGADKVRVKWPNDLYLQDRKLAGILVELTGKTGDAAQIVIGAGINMAMRRVEESVVNQGWITLQEAGINLDRNTLAAMLIRELRAALELFEQEGLAPYLSRWEKLDNFINRPVKLIIGDKEIFGISRGIDKQGALLLEQDGIIKPWMGGEISLRSAEK

SEQ ID NO: 36372 - DNA, 22 bp, Artificial
  LNA sequence targeting Dusp9
cctacagttccaagaagtctaa

SEQ ID NO: 36373 - DNA, 22 bp, Artificial
  LNA targeting Dusp9
gaagcaggaaggagtctacacg

SEQ ID NO: 36374 - DNA, 22 bp, Artificial
  LNA targeting Dusp9
cagtttgaccaccctcagtcac

SEQ ID NO: 36375 - DNA, 22 bp, Artificial
  LNA targeting Dusp9
aaagaaacagtcagggcaccag

SEQ ID NO: 36376 - DNA, 22 bp, Artificial
  LNA targeting Dusp9
cacaggtattgccagctccagg

SEQ ID NO: 36377 - DNA, 22 bp, Artificial
  LNA targeting Dusp9
cacacacacagagtctacaacg

SEQ ID NO: 36378 - DNA, 22 bp, Artificial
  LNA targeting Dcaf12L1
cctgtctgccatacattctaca

SEQ ID NO: 36379 - DNA, 22 bp, Artificial
  LNA targeting Dcaf12L1
gctcagacttcttcctttgcac

SEQ ID NO: 36380 - DNA, 22 bp, Artificial
  LNA targeting Dcaf12L1
gtaacagatctattctacttga

SEQ ID NO: 36381 - DNA, 22 bp, Artificial
  LNA targeting Dcaf12L1
cattatctctatttatctgaac

SEQ ID NO: 36382 - DNA, 22 bp, Artificial
  LNA targeting Dcaf12L1
ggagaaaaccaatctatccgca

SEQ ID NO: 36383 - DNA, 22 bp, Artificial
  LNA targeting Calm2
gccagagtaagccacatgcaac

SEQ ID NO: 36384 - DNA, 22 bp, Artificial
  LNA targeting Calm2
ttagatgtgcagacgggcttag

SEQ ID NO: 36385 - DNA, 23 bp, Artificial
  LNA targeting Calm2
ttacagctccacacttcaacaac

SEQ ID NO: 36386 - DNA, 22 bp, Artificial
  LNA targeting Calm2
acatgctgacagttcctaaaag

SEQ ID NO: 36387 - DNA, 22 bp, Artificial
  Scrambled Control LNA
gtgtaacacgtctatacgccca

SEQ ID NO: 36388 - DNA, 23 bp, Artificial
  LNA targeting Tsix
agagtacagttaacaagctgggt

SEQ ID NO: 36389 - DNA, 20 bp, Artificial
  LNA targeting Tsix
tgttttgtgacagggattct

SEQ ID NO: 36390 - DNA, 21 bp, Artificial
  LNA targeting Tsix
ttcttccttgcattgtgtcta

SEQ ID NO: 36391 - DNA, 22 bp, Artificial
  LNA targeting Tsix
ggtgtgtcctatggtcctatgt

SEQ ID NO: 36392 - DNA, 22 bp, Artificial
  LNA targeting Tsix
ccatgtaacagaatgttgagat

SEQ ID NO: 36393 - DNA, 22 bp, Artificial
  LNA targeting Tsix
cataatctgtgaccagtacctc

SEQ ID NO: 36394 - DNA, 20 bp, Artificial
  LNA targeting Tsix
catcagaagaggttagatat

SEQ ID NO: 36395 - DNA, 22 bp, Artificial
  LNA targeting Tsix
tggaggcaggtggatttctaac

SEQ ID NO: 36396 - DNA, 22 bp, Artificial
  LNA targeting Tsix
ccaacatgcgccagcctcctca

SEQ ID NO: 36397 - DNA, 22 bp, Artificial
  LNA targeting Tsix
aagtgctgggattacaggcgtg

SEQ ID NO: 36398 - DNA, 22 bp, Artificial
  LNA targeting Tsix
atcatgactcactgcagcctcg

SEQ ID NO: 36399 - DNA, 22 bp, Artificial
  LNA targeting Tsix
tcgctataccacagtccacagg

SEQ ID NO: 36400 - DNA, 22 bp, Artificial
  LNA targeting Tsix
tgaagcagagagcaggaagaag

SEQ ID NO: 36401 - DNA, 22 bp, Artificial
  LNA targeting Tsix
acacctcaaatctcaagaggct

SEQ ID NO: 36402 - DNA, 22 bp, Artificial
  LNA targeting Tsix
gattactccctagagcaaggcc

SEQ ID NO: 36403 - DNA, 22 bp, Artificial
  LNA targeting Tsix
cacaaggaaagggctcggcaca

SEQ ID NO: 36404 - DNA, 22 bp, Artificial
  LNA targeting Tsix
ccacttccctcccttcaaatgc

SEQ ID NO: 36405 - DNA, 22 bp, Artificial Sequence
  Dusp9-1-a
cctacagttccaagaagtctaa

SEQ ID NO: 36406 - DNA, 22 bp, Artificial Sequence
  Dusp9-1-b
gaagcaggaaggagtctacacg

SEQ ID NO: 36407 - DNA, 22 bp, Artificial Sequence
  Dusp9-2-a
cagtttgaccaccctcagtcac

SEQ ID NO: 36408 - DNA, 22 bp, Artificial Sequence
  Dusp9-2-b
aaagaaacagtcagggcaccag

SEQ ID NO: 36409 - DNA, 22 bp, Artificial Sequence
  Dusp9-3-a
cacaggtattgccagctccagg

SEQ ID NO: 36410 - DNA, 22 bp, Artificial Sequence
  Dusp9-3-b
cacacacacagagtctacaacg

SEQ ID NO: 36411 - DNA, 22 bp, Artificial Sequence
  Dcaf12I1-1
cctgtctgccatacattctaca

SEQ ID NO: 36412 - DNA, 22 bp, Artificial Sequence
  Dcaf12I1-2
gctcagacttcttcctttgcac

SEQ ID NO: 36413 - DNA, 22 bp, Artificial Sequence
  Dcaf12I1-3
gtaacagatctattctacttga

SEQ ID NO: 36414 - DNA, 22 bp, Artificial Sequence
  Dcaf12I1-4-a
cattatctctatttatctgaac

SEQ ID NO: 36415 - DNA, 22 bp, Artificial Sequence
  Dcaf12I1-4-b
ggagaaaaccaatctatccgca

SEQ ID NO: 36416 - DNA, 22 bp, Artificial Sequence
  Calm2-1-a
gccagagtaagccacatgcaac

SEQ ID NO: 36417 - DNA, 22 bp, Artificial Sequence
  Calm2-1-b
ttagatgtgcagacgggcttag

SEQ ID NO: 36418 - DNA, 23 bp, Artificial Sequence
  Calm2-2-a
ttacagctccacacttcaacaac

SEQ ID NO: 36419 - DNA, 22 bp, Artificial Sequence
  Calm2-2-b
acatgctgacagttcctaaaag

SEQ ID NO: 36420 - DNA, 22 bp, Artificial Sequence
  LNA-Scr
gtgtaacacgtctatacgccca

SEQ ID NO: 36421 - DNA, 19 bp, Artificial Sequence
  Negative control A
taacacgtctatacgccca

SEQ ID NO: 36422 - DNA, 21 bp, Artificial Sequence
  Native RIP-qPCR primer Tug1_F
caggtctgtaggctgatggag

SEQ ID NO: 36423 - DNA, 20 bp, Artificial Sequence
  Native RIP-qPCR primerTug1_R
aagtgaactacgtcccgtgc

SEQ ID NO: 36424 - DNA, 20 bp, Artificial Sequence
  Native RIP-qPCR primer Dusp9_4F
tcacacagccactgttggtt

SEQ ID NO: 36425 - DNA, 20 bp, Artificial Sequence
  Native RIP-qPCR primer Dusp9_4R
gtcctgctgccacaggtatt

SEQ ID NO: 36426 - DNA, 20 bp, Artificial Sequence
  Native RIP-qPCR primer Calm2_F
gcagaactgcaggacatgat

SEQ ID NO: 36427 - DNA, 20 bp, Artificial Sequence
  Native RIP-qPCR primer Calm2_R
caaacacacggaatgcttct

SEQ ID NO: 36428 - DNA, 20 bp, Artificial Sequence
  Native RIP-qPCR primer U1-F
ggaaatcatacttacctggc

SEQ ID NO: 36429 - DNA, 20 bp, Artificial Sequence
  Native RIP-qPCR primer U1-R
aaacgcagtcccccactacc

SEQ ID NO: 36430 - DNA, 20 bp, Artificial Sequence
  Native RIP-qPCR primer Dusp9_F
ggggatccgtctccatgaac

SEQ ID NO: 36431 - DNA, 20 bp, Artificial Sequence
  Native RIP-qPCR primer Dusp9_ChIP_R2
tgaccgactcagactctcca

SEQ ID NO: 36432 - DNA, 20 bp, Artificial Sequence
  Native RIP-qPCR primer Calm2_F
gcagaactgcaggacatgat

SEQ ID NO: 36433 - DNA, 20 bp, Artificial Sequence
  Native RIP-qPCR primer Calm2_R
caaacacacggaatgcttct

SEQ ID NO: 36434 - DNA, 20 bp, Artificial Sequence
  Native RIP-qPCR primer Dcaf12l1-1F
cccaatgcgctctacactca

SEQ ID NO: 36435 - DNA, 20 bp, Artificial Sequence
  Native RIP-qPCR primer Dcaf12l1-1R
actggatactctggggcagt

SEQ ID NO: 36436 - DNA, 20 bp, Artificial Sequence
  Native RIP-qPCR primer Calm2_int_F
gccaagcaaacttgactccg

SEQ ID NO: 36437 - DNA, 20 bp, Artificial Sequence
  Native RIP-qPCR primer Calm2_int_R
gaccacactgccatggatca

SEQ ID NO: 36438 - DNA, 20 bp, Artificial Sequence
  Native RIP-qPCR primer Dcaf12l1-1R
actggatactctggggcagt

SEQ ID NO: 36439 - DNA, 24 bp, Artificial Sequence
  Native RIP-qPCR primer Dcaf12l1-int-R
tgtaattcatgttgtgcatgctgt

SEQ ID NO: 36440 - DNA, 20 bp, Artificial Sequence
  Native RIP-qPCR primer Dcaf12l1_ChIP_F
ccagagtgggcaactggtag

SEQ ID NO: 36441 - DNA, 20 bp, Artificial Sequence
  Native RIP-qPCR primer Calm2_ChIP_1F
agctatatgcacccactcgg

SEQ ID NO: 36442 - DNA, 20 bp, Artificial Sequence
  Native RIP-qPCR primer Calm2_ChIP_1R
tgggcattcgttcgaaaggg

SEQ ID NO: 36443 - DNA, 20 bp, Artificial Sequence
  Native RIP-qPCR primer Dcaf12l1_ChIP_R
gaccacatcatgcgcattcc

SEQ ID NO: 36444 - DNA, 20 bp, Artificial Sequence
  Native RIP-qPCR primer Calm2_ChIP_1F
agctatatgcacccactcgg

SEQ ID NO: 36445 - DNA, 20 bp, Artificial Sequence
  Native RIP-qPCR primer Calm2_ChIP_1R
tgggcattcgttcgaaaggg

SEQ ID NO: 36446 - DNA, 20 bp, Artificial Sequence
  Native RIP-qPCR primer Calm2_DNAse_1A_F
ggggacggatgacgtaagtg

SEQ ID NO: 36447 - DNA, 20 bp, Artificial Sequence
  Native RIP-qPCR primer Calm2_DNAse_1A_R
aatcagcagcaagctcaacg

SEQ ID NO: 36448 - DNA, 20 bp, Artificial Sequence
  Native RIP-qPCR primer Dcaf12l1_CHIP_F
ccagagtgggcaactggtag

SEQ ID NO: 36449 - DNA, 20 bp, Artificial Sequence
  Native RIP-qPCR primer Dcaf12l1_ChIP_R
gaccacatcatgcgcattcc

SEQ ID NO: 36450 - DNA, 19 bp, Artificial Sequence
  Native RIP-qPCR primer Dcaf12l1_DNAse_72F
gtcggcctgacgcatgata

SEQ ID NO: 36451 - DNA, 20 bp, Artificial Sequence
  Native RIP-qPCR primer Dcaf12l1_DNAse_72R
gctgatcggttgatcgctct

SEQ ID NO: 36452 - DNA, 23 bp, Artificial Sequence
  Native RIP-qPCR primer PES1-F
gaggagaagtgactctggtccat

SEQ ID NO: 36453 - DNA, 20 bp, Artificial Sequence
  Native RIP-qPCR primer
agaagcggaaagcccacgat

SEQ ID NO: 36454 - DNA, 20 bp, Artificial Sequence
  Native RIP-qPCR primer IRAK1-F
cacattaggccagctcgcag

SEQ ID NO: 36455 - DNA, 22 bp, Artificial Sequence
  Native RIP-qPCR primer IRAK1-R
tggctgtaagtctcatggttca

SEQ ID NO: 36456 - DNA, 85 bp, Artificial Sequence
  Native RIP-qPCR primer Dusp9_EMSA probe
ggccactttgactcgtgtagactccttcctgcttctctcactagggcttagacttcttggaactgtagggtgtgaacccagagac

SEQ ID NO: 36457 - DNA, 105 bp, Artificial Sequence
  Native RIP-qPCR primer Dcaf12l1-EMSA probe
tcaaatagaggagctggggattaaaaagataggtctgattaaaggactgtgcagttcagataaatagagataatgggatgccgtgcggatagattggttttctcc

SEQ ID NO: 36458 - DNA, 106 bp, Artificial Sequence
  Native RIP-qPCR primer Calm2_EMSA probe
gtagcttttaggaactgtcagcatgttgttgttgaagtgtggagctgtaactctgcgtggactgtggacagtcaacaatatgtacttaaaagttgcactattgcaa

SEQ ID NO: 36459 - DNA, 23 bp, Artificial Sequence
  Native RIP-qPCR primer Larp1-FAM1-WT
gggaggtatatgtggacatagag

SEQ ID NO: 36460 - DNA, 23 bp, Artificial Sequence
  Native RIP-qPCR primer Larp1-FAM1-Mut
gggaggtatattccaccatagag

SEQ ID NO: 36461 - DNA, 24 bp, Artificial Sequence
  Native RIP-qPCR primer Nucks1-FAM3-WT
gggtgtgcggacggaggtcagaaa

SEQ ID NO: 36462 - DNA, 24 bp, Artificial Sequence
  Native RIP-qPCR primer Nucks1-FAM3-Mut
gggtgtgcggaccctcctcagaaa
